(19) United States
(12) Patent Application Publication
(10) Pub. No.: US 2003/0167524 A1
(43) Pub. Date: Sep. 4, 2003

(54) Methods for the production of multimeric protein complexes, and related compositions

(76) Inventors: Gijs Van Rooijen, Alberta (CA); Steven Zaplachinski, Alberta (CA); Peter-Bernard Heifetz, San Diego, CA (US); Steven Briggs, Del Mar, CA (US); Bipin Kumar Dalmia, San Diego, CA (US); Greg Del Val, San Diego, CA (US)

Correspondence Address: HELLER EHRMAN WHITE & MCAULIFFE LLP, 4350 LA JOLLA VILLAGE DRIVE, 7TH FLOOR, SAN DIEGO, CA, 92122-1246, US

(21) Appl. No.: 10/032,201

(22) Filed: Dec. 19, 2001

Related U.S. Application Data
(63) Continuation-in-part of application No. 10/006,038, filed on Dec. 4, 2001, now abandoned.
(63) Continuation-in-part of application No. 60/331,363, filed on Dec. 19, 2000.
(60) Provisional application No. 60/302,885, filed on Jul. 5, 2001.

(51) Int. Cl. A01H 5/00; C12N 5/04

(52) U.S. Cl. 800/281; 435/419

(57) ABSTRACT

Improved methods for the production of multimeric-protein-complexes, such as redox proteins and immunoglobulins, in association with oil bodies are described. The redox protein is enzymatically active when prepared in association with the oil bodies. Also provided are related nucleic acids, proteins, cells, plants, and compositions.

### RELATED APPLICATIONS

[0001] Benefit of priority under §119(e) is claimed to U.S. provisional application Serial No. 60/302,885, filed Jul. 5, 2001, to van Rooijen, et al., entitled “METHODS FOR THE PRODUCTION OF REDOX PROTEINS”. This application is a continuation-in-part of U.S. utility application Ser. No. 10/006,038, filed Dec. 4, 2001 to van Rooijen, et al., entitled “METHODS FOR THE PRODUCTION OF REDOX PROTEINS”, which is a continuation-in-part of U.S. utility application Ser. No. 09/742,900, filed Dec. 19, 2000 to Heifetz, et al., entitled “METHOD OF PRODUCTION AND DELIVERY OF THIOREDOXIN”. This application is also a continuation-in-part of U.S. utility application Ser. No. 09/742,900. The subject matter of each of the provisional and utility applications is incorporated herein by reference in its entirety.

[0002] This application is related to International PCT application No. (attorney docket no. 38814-351PC), filed Dec. 19, 2001 and Taiwanese application (attorney docket no. 38814-351TW), filed Dec. 19, 2001. The subject matter of each of these applications is incorporated by reference in its entirety.

### FIELD OF THE INVENTION

[0003] The present invention relates to multimeric-protein-complexes, redox proteins, and recombinant polypeptides; and improved methods for their production.

### BACKGROUND

[0004] Multimeric proteins (i.e. proteins compising multiple polypeptide chains) are a biologically and commercially important class of proteins. Antibodies for example are multimeric proteins which are used to treat a wide range of disease conditions. However in view of their complexity, multimeric proteins frequently represent significant manufacturing challenges.

[0005] Redox proteins are also a commercially important class of proteins with applications in a variety of different industries including the pharmaceutical, personal care and food industry. For example, the redox protein thioredoxin may be used in the manufacture of personal care products (Japanese Patent Applications JP9012471A2, JP103743A2, JP1129785A2), pharmaceutical compositions/products (Aota et al. (1996) J. Cardiov. Pharmacol. (1996) 27: 727-732) as well as to reduce protein allergens present in food products such as milk (del Val et al. (1999) J. Allerg. Vlin. Immunol. 103: 690-697) and wheat (Buchanan et al. (1997) Proc. Natl. Acad. Sci. USA 94: 5372-5377).

[0006] However, there is a need in the art to further improve the methods for the recombinant expression of multimeric proteins, including redox proteins. The present invention satifies this need and provides related advantages as well.

### SUMMARY OF THE INVENTION

[0007] The present invention relates to novel and improved methods of producing a first and/or second recombinant polypeptides, multimeric-protein-complexes, heteromultimeric-protein-complexes, multimeric-fusion-proteins, heteromultimeric-fusion-proteins, immunoglobulin-polypeptide-chains, immunoglobulins, redox-fusion-polypeptides, and/or thioredoxin-related proteins; in association with oil bodies. Accordingly, provided herein are methods of producing a recombinant multimeric-protein-complex, said method comprising: (a) producing in a cell comprising oil bodies, a first recombinant polypeptide and a second recombinant polypeptide wherein said first recombinant polypeptide is capable of associating with said second recombinant polypeptide to form said multimeric-protein-complex; and (b) associating said multimeric-protein-complex with an oil body through an oil-body-targeting-protein capable of associating with said oil bodies and said first recombinant polypeptide.

[0008] The method further contemplates isolating the oil bodies associated with said recombinant multimeric-protein-complex. The second recombinant polypeptide can be associated with a second oil-body-targeting-protein capable of associating with an oil body and said second recombinant polypeptide. Each of said oil-body-targeting-proteins can be a oil-body-protein or an immunoglobulin. The oil-body-targeting-protein can be an oleosin or caleosin. When the oil-body-targeting-protein can be an oleosin or caleosin, the first recombinant polypeptide can be fused to said oleosin or caleosin. Likewise, the second recombinant polypeptide can be fused to a second oleosin or second caleosin capable of associating with an oil body. The first and second recombinant polypeptides can be produced as a multimereic-fusion-protein comprising said first and second polypetide, and can form a multimeric-protein-complex. The multimeric-protein-complex can be a heteromultimeric-protein-complex, and the heteromultimeric-protein-complex can be an enzymatically active redox complex or an immunoglobulin. In one embodiment, the first recombinant polypeptide is capable of associating with said second recombinant polypeptide in the cell. In another embodiment, the first recombinant polypeptide can be a thioredoxin and the second recombinant polypeptide can be a thioredoxin-reductase. In particular embodiments, the thioredoxin can be selected from the group consisting of SEQ ID NOs:38, 42, 46, 50 and SEQ ID NOs:52-194; and the thioredoxin-reductase can be selected from the group consisting of those set forth in SEQ ID NOs:8, 9, 10, 40, 44, 48, 50 and SEQ ID NOs:195-313. In another embodiment, the first recombinant polypeptide can be an immunoglobulin-polypeptide-chain. For example, the first recombinant polypeptide can be an immunoglobulin light chain, or an immunologically active portion thereof, and the second recombinant polypeptide can be an immunoglobulin heavy chain, or an immunologically active portion thereof. In this embodiment, the oil-body-targeting-protein can comprise protein A, protein L or protein G. The cell can be a plant cell, such as a safflower cell, and the like.

[0009] Also provided herein is a method of expressing a recombinant multimeric-protein-complex comprising a first and second recombinant polypeptide in a cell, said method comprising:

[0010] (a) introducing into a cell a first chimeric nucleic acid sequence comprising:

[0011] (i) a first nucleic acid sequence capable of regulating transcription in said cell operatively linked to;

[0012] (ii) a second nucleic acid sequence encoding a first recombinant polypeptide;

[0013] (b) introducing into said cell a second chimeric nucleic acid sequence comprising:

[0014] (i) a third nucleic acid sequence capable of regulating transcription in said cell operatively linked to;

[0015] (ii) a fourth nucleic acid sequence encoding a second recombinant polypeptide;

[0016] (c) growing said cell under conditions to permit expression of said first and second recombinant polypeptide in a progeny cell comprising oil bodies wherein said first recombinant polypeptide and said second recombinant polypeptide are capable of forming a multimeric-protein-complex; and

[0017] (d) associating said first recombinant polypeptide with an oil body through an oil-body-targeting-protein capable of associating with said oil bodies and said first recombinant polypeptide. This method further contemplates isolating from the progeny cell, oil bodies comprising the multimeric-protein-complex. The second recombinant polypeptide can be associated with a second oil-body-targeting-protein capable of associating with an oil body and second recombinant polypeptide. Each of said oil-body-targeting-proteins can be a oil-body-protein or an immunoglobulin. The oil-body-targeting-protein can be an oleosin or caleosin. When the oil-body-targeting-protein is an oleosin or caleosin, the first recombinant polypeptide can be fused to said oleosin or caleosin. Likewise, the second recombinant polypeptide can be fused to a second oleosin or second caleosin capable of associating with an oil body. The first and second recombinant polypeptides can be produced as a multimereic-fusion-protein comprising said first and second polypetide, and can form a multimeric-protein-complex. The multimeric-protein-complex can be a heteromultimeric-protein-complex, and the heteromultimeric-protein-complex can be an enzymatically active redox complex or an immunoglobulin. In one embodiment, the first recombinant polypeptide and said second recombinant polypeptide are capable of forming a multimeric-protein-complex in said progeny cell. In another embodiment, the first recombinant polypeptide can be a thioredoxin and the second recombinant polypeptide can be a thioredoxin-reductase. In particular embodiments, the thioredoxin can be selected from the group consisting of SEQ ID NOs:38, 42, 46, 50 and SEQ ID NOs:52-194; and the thioredoxin-reductase can be selected from the group consisting of those set forth in SEQ ID NOs:8, 9, 10, 40, 44, 48, 50 and SEQ ID NOs:195-313. In another embodiment, the first recombinant polypeptide can be an immunoglobulin-polypeptide-chain. For example, the first recombinant polypeptide can be an immunoglobulin light chain, or an immunologically active portion thereof, and the second recombinant polypeptide can be an immunoglobulin heavy chain, or an immunologically active portion thereof. In this embodiment, the oil-body-targeting-protein can comprise protein A, protein L or protein G. The cell can be a plant cell, such as a safflower cell, and the like.

[0018] Also provided herein are methods of producing in a plant a recombinant multimeric-protein-complex, said method comprising:

[0019] (a) preparing a first plant comprising cells, said cells comprising oil bodies and a first recombinant polypeptide wherein said first recombinant polypeptide is capable of associating with said oil bodies through an oil-body-targeting-protein;

[0020] (b) preparing a second plant comprising cells, said cells comprising oil bodies and a second recombinant polypeptide; and

[0021] (c) sexually crossing said first plant with said second plant to produce a progeny plant comprising cells, said cells comprising oil bodies, wherein said oil bodies are capable of associating with said first recombinant polypeptide, and said first recombinant recombinant polypeptide is capable of associating with said second recombinant polypeptide to form said recombinant multimeric-protein-complex. The second recombinant polypeptide can be associated with oil bodies through a second oil-body-targeting-protein in the second plant. The oil bodies can be isolated from the progeny plant comprising said multimeric-protein-complex. The oil-body-targeting-protein can be selected from an oil-body-protein or an immunoglobulin, wherein the oil-body-protein can be an oleosin or caleosin. The first recombinant polypeptide can be fused to the oleosin or caleosin; and the second recombinant polypeptide can be fused to a second oleosin or second caleosin capable of associating with an oil body. The first and second recombinant polypeptide can form a multimeric-protein-complex, such as a heteromultimeric-protein-complex, wherein the heteromultimeric-protein-complex can be an enzymatically active redox complex or an immunoglobulin. In a particular embodiment, the first recombinant polypeptide is a thioredoxin and the second recombinant polypeptide is a thioredoxin-reductase. The thioredoxin can be selected from the group consisting of SEQ ID NOs:38, 42, 46, 50 and SEQ ID NOs:52-194; and the thioredoxin-reductase can be selected from the group consisting of those set forth in SEQ ID NOs:8, 9, 10, 40, 44, 48, 50 and SEQ ID NOs:195-313. In another embodiment, the first recombinant polypeptide can be an immunoglobulin-polypeptide-chain. For example, the first recombinant polypeptide can be an immunoglobulin light chain, or an immunologically active portion thereof, and the second recombinant polypeptide can be an immunoglobulin heavy chain, or an immunologically active portion thereof. In this embodiment, the oil-body-targeting-protein can comprise protein A, protein L or protein G. The plant can be a safflower plant.

[0022] Also provided herein are chimeric nucleic acids encoding a multimeric-fusion-protein as described herein, said nucleic acid comprising:

[0023] (a) a first nucleic acid sequence encoding an oil-body-targeting-protein operatively linked in reading frame to;

[0024] (b) a second nucleic acid sequence encoding a first recombinant polypeptide; linked in reading frame to;

[0025] (c) a third nucleic acid sequence encoding a second recombinant polypeptide, wherein said first and second recombinant polypeptide are capable of forming a multimeric-protein-complex. The oil-body-targeting-protein can be selected from an oil-body-protein or an immunoglobulin. The oil-body-protein can be an oleosin or caleosin. The multimeric-protein-complex can be a heteromultimeric-protein-complex, and the first and second recombinant polypeptide can form an enzymatically active heteromultimeric redox complex or an immunoglobulin. In a particular embodiment, the first recombinant polypeptide is a thioredoxin and the second recombinant polypeptide is a thioredoxin-reductase. The thioredoxin can be selected from the group consisting of SEQ ID NOs:38, 42, 46, 50 and SEQ ID NOs:52-194; and the thioredoxin-reductase can be selected from the group consisting of those set forth in SEQ ID NOs:8, 9, 10, 40, 44, 48, 50 and SEQ ID NOs:195-313. In another embodiment, the first recombinant polypeptide can be an immunoglobulin-polypeptide-chain. For example, the first recombinant polypeptide can be an immunoglobulin light chain, or an immunologically active portion thereof, and the second recombinant polypeptide can be an immunoglobulin heavy chain, or an immunologically active portion thereof. In this embodiment, the oil-body-targeting-protein can comprise protein A, protein L or protein G. In yet another embodiment, positioned between the nucleic acid sequence encoding an oil-body-targeting-protein and the nucleic acid sequence encoding a first recombinant polypeptide can be a linker nucleic acid sequence encoding a oil-body-surface-avoiding linker amino acid sequence. The oil-body-surface-avoiding linker amino acid sequence can be substantially negatively charged, or have a molecular weight of at least 35 kd. Optionally, the gene fusion further comprises a linker nucleic acid sequence encoding an amino acid sequence that is specifically cleavable by an enzyme or a chemical, wherein the linker sequence is positioned between the oil-body-surface-avoiding linker amino acid sequence that is also a non-proteolytic linker and said sequence encoding the first recombinant polypeptide.

[0026] Also provided herein are recombinant multimeric-fusion-proteins comprising (i) an oil-body-targeting-protein, or fragment thereof, (ii) a first recombinant polypeptide and a (iii) second recombinant polypeptide, wherein said first and second recombinant polypeptides are capable of forming a multimeric-protein-complex. The oil-body-targeting-protein can be selected from an oil-body-protein or an immunoglobulin, and the oil-body-protein can be an oleosin or a caleosin. The multimeric-fusion-protein can be a heteromultimeric-fusion-protein, wherein said first and second recombinant polypeptide form an enzymatically active heteromultimeric redox complex or an immunoglobulin. In a particular embodiment, the first recombinant polypeptide is a thioredoxin and the second recombinant polypeptide is a thioredoxin-reductase. The thioredoxin can be selected from the group consisting of SEQ ID NOs:38, 42, 46, 50 and SEQ ID NOs:52-194; and the thioredoxin-reductase can be selected from the group consisting of those set forth in SEQ ID NOs:8, 9, 10, 40, 44, 48, 50 and SEQ ID NOs:195-313. In another embodiment, the first recombinant polypeptide can be an immunoglobulin-polypeptide-chain. For example, the first recombinant polypeptide can be an immunoglobulin light chain, or an immunologically active portion thereof, and the second recombinant polypeptide can be an immunoglobulin heavy chain, or an immunologically active portion thereof. In this embodiment, the oil-body-targeting-protein can comprise protein A, protein L or protein G. In yet another embodiment, positioned between the nucleic acid sequence encoding an oil-body-targeting-protein and the nucleic acid sequence encoding a first recombinant polypeptide can be a linker nucleic acid sequence encoding a oil-body-surface-avoiding linker amino acid sequence. The oil-body-surface-avoiding linker amino acid sequence can be substantially negatively charged, or have a molecular weight of at least 35 kd. Optionally, the gene fusion further comprises a linker nucleic acid sequence encoding an amino acid sequence that is specifically cleavable by an enzyme or a chemical, wherein the linker sequence is positioned between the oil-body-surface-avoiding linker amino acid sequence and said sequence encoding the first recombinant polypeptide.

[0027] Also provide herein are isolated oil bodies comprising a multimeric-protein-complex comprising (i) an oil-body-targeting-protein and (ii) a first recombinant polypeptide, said oil bodies further comprising a second recombinant polypeptide, wherein said first and second recombinant polypeptide are capable of forming a multimeric-protein-complex. The oil-body-targeting-protein can be selected from an oil-body-protein or an immunoglobulin, and the oil-body-protein can be an oleosin or a caleosin. The multimeric-fusion-protein can be a heteromultimeric-fusion-protein, wherein said first and second recombinant polypeptide form an enzymatically active heteromultimeric redox complex or an immunoglobulin. In a particular embodiment, the first recombinant polypeptide is a thioredoxin and the second recombinant polypeptide is a thioredoxin-reductase. In another embodiment, the first recombinant polypeptide can be an immunoglobulin-polypeptide-chain. For example, the first recombinant polypeptide can be an immunoglobulin light chain, or an immunologically active portion thereof, and the second recombinant polypeptide can be an immunoglobulin heavy chain, or an immunologically active portion thereof. In this embodiment, the oil-body-targeting-protein can comprise protein A, protein L or protein G.

[0028] Also provided herein are isolated oil bodies comprising

[0029] (a) a first fusion protein comprising a first oil-body-targeting-protein fused to a first recombinant polypeptide; and

[0030] (b) a second fusion protein comprising a second oil-body-targeting-protein fused to a second recombinant polypeptide,

[0031] wherein said first and second recombinant polypeptide are capable of forming a multimeric-protein-complex. The oil-body-targeting-protein can be selected from an oil-body-protein or an immunoglobulin, and the oil-body-protein can be an oleosin or a caleosin. The multimeric-fusion-protein can be a heteromultimeric-fusion-protein, wherein said first and second recombinant polypeptide form an enzymatically active heteromultimeric redox complex or an immunoglobulin. In a particular embodiment, the first recombinant polypeptide is a thioredoxin and the second recombinant polypeptide is a thioredoxin-reductase. The thioredoxin can be selected from the group consisting of SEQ ID NOs:38, 42, 46, 50 and SEQ ID NOs:52-194; and the thioredoxin-reductase can be selected from the group consisting of those set forth in SEQ ID NOs:8, 9, 10, 40, 44, 48, 50 and SEQ ID NOs:195-313. In another embodiment, the first recombinant polypeptide can be an immunoglobulin-polypeptide-chain. For example, the first recombinant polypeptide can be an immunoglobulin light chain, or an immunologically active portion thereof, and the second recombinant polypeptide can be an immunoglobulin heavy chain, or an immunologically active portion thereof. In this embodiment, the oil-body-targeting-protein can comprise protein A, protein L or protein G.

[0032] Also provided are cells and transgenic plants comprising oil bodies, multimeric-protein-complexes, multimeric-fusion-proteins, set forth herein. In one embodiment, the first recombinant polypeptide can be an immunoglobulin-polypeptide-chain. For example, the first recombinant polypeptide can be an immunoglobulin light chain, or an immunologically active portion thereof, and the second recombinant polypeptide can be an immunoglobulin heavy chain, or an immunologically active portion thereof. In this embodiment, the oil-body-targeting-protein can comprise protein A, protein L or protein G. In embodiments, wherein said first recombinant polypeptide is a thioredoxin and said second recombinant polypeptide is a thioredoxin-reductase, the methods described herein can be used to formulate the oil bodies for use in the preparation of a food product, personal care product or pharmaceutical composition. These formulations can further comprise the addition of NADP or NADPH. The food product can be a milk or wheat based food product. The personal care product can reduce the oxidative stress to the surface area of the human body or can be used to lighten the skin. The pharmaceutical composition can be used to treat chronic obstructive pulmonary disease (COPD), cataracts, diabetes, envenomation, bronchiopulmonary disease, malignancies, psoriasis, reperfusion injury, wound healing, sepsis, GI bleeding, intestinal bowel disease (IBD), ulcers, GERD (gastro esophageal reflux disease).

[0033] Also provided herein are compositions comprising isolated oil bodies, thioredoxin and thioredoxin-reductase, wherein said thioredoxin can be selected from the group consisting of SEQ ID NOs:38, 42, 46, 50 and SEQ ID NOs:52-194, and said thioredoxin-reductase can be selected from the group consisting of those set forth in SEQ ID NOs:8, 9, 10, 40, 44, 48, 50 and SEQ ID NOs:195-313. The composition can further comprise NADP or NADPH. In another embodiment, the composition comprises a first recombinant polypeptide that can be an immunoglobulin-polypeptide-chain and a second recombinant polypeptide. For example, the first recombinant polypeptide can be an immunoglobulin light chain, or an immunologically active portion thereof, and the second recombinant polypeptide can be an immunoglobulin heavy chain, or an immunologically active portion thereof. In this embodiment, the oil-body-targeting-protein can comprise protein A, protein L or protein G.

[0034] Also provided are multimeric-fusion-proteins, wherein the fusion-protein contains two or more polypeptide chains selected from the group of proteins set forth in FIG. 5. Methods are also provided of reducing allergenicity of a food comprising the steps of providing the isolated oil bodies set forth herein; and adding the isolated oil bodies to the food, whereby allergenicity of the food is reduced. The food can be selected from the group consisting of wheat flour, wheat dough, milk, cheese, yogurt and ice cream. The various methods of treating food can further comprise providing NADH as a co-factor in the substantial absence of NADPH.

[0035] Also provided herein are methods of treating or protecting a target against oxidative stress, comprising the steps of providing the recombinant redox fusion polypeptide comprising thioredoxin and thioredoxin-reductase; and contacting the recombinant fusion polypeptide with a target, wherein the target is susceptible to oxidative stress, thereby treating or protecting against the stress. The target can be selected from the group consisting of a molecule, a molecular complex, a cell, a tissue, and an organ.

[0036] Also provided herein are methods for preparing an enzymatically active redox protein associated with oil bodies comprising:

[0037] a) producing in a cell a redox fusion polypeptide comprising a first redox protein linked to a second redox protein;

[0038] b) associating said redox fusion polypeptide with oil bodies through an oil-body-targeting-protein capable of associating with said redox fusion polypeptide and said oil bodies; and

[0039] c) isolating said oil bodies associated with said redox fusion polypeptide. The first redox protein can be a thioredoxin and the second redox protein can be a thioredoxin-reductase.

[0040] Also, provided herein are methods of producing an immunoglobulin, said method comprising: (a) producing in a cell comprising oil bodies, a first immunoglobulin-polypeptide-chain and a second immunoglobulin-polypeptide-chain wherein said first immunoglobulin-polypeptide-chain is capable of associating with said second immunoglobulin-polypeptide-chain to form said immunoglobulin; and (b) associating said immunoglobulin with an oil body through an oil-body-targeting-protein capable of associating with said oil bodies and said first immunoglobulin-polypeptide-chain. For example, the first immunoglobulin-polypeptide-chain can be an immunoglobulin light chain, or an immunologically active portion thereof, and the second immunoglobulin-polypeptide-chain can be an immunoglobulin heavy chain, or an immunologically active portion thereof. In this embodiment, the oil-body-targeting-protein can comprise protein A, protein L or protein G.

[0041] Also provided herein are methods for preparing a redox protein or an immunoglobulin associated with oil bodies comprising:

[0042] a) introducing into a cell a chimeric nucleic acid sequence comprising:

[0043] 1) a first nucleic acid sequence capable of regulating transcription in said cell operatively linked to;

[0044] 2) a second nucleic acid sequence encoding a recombinant fusion polypeptide comprising (i) a nucleic acid sequence encoding a sufficient portion of an oil-body-protein to provide targeting of said recombinant fusion polypeptide to an oil body linked to (ii) a nucleic acid sequence encoding a redox fusion polypeptide comprising a first redox protein linked to a second redox protein, or a nucleic acid sequence encoding a immunoglobulin comprising a first immunoglobulin-polypeptide-chain linked to a second immunoglobulin-polypeptide-chain, operatively linked to;

[0045] 3) a third nucleic acid sequence capable of terminating transcription in said cell;

[0046] b) growing said cell under conditions to permit expression of said redox fusion polypeptide or immunoglobulin in a progeny cell comprising oil bodies; and

[0047] c) isolating from said progeny cell said oil bodies comprising said redox fusion polypeptide or immunoglobulin. In certain embodiments, positioned between said nucleic acid sequence encoding a sufficient portion of an oil-body-protein and said nucleic acid sequence encoding a redox fusion polypeptide or immunoglobulin can be a linker nucleic acid sequence encoding a oil-body-surface-avoiding linker amino acid sequence. The oil-body-surface-avoiding linker amino acid sequence can be substantially negatively charged or have a molecular weight of at least 35 kd. Optionally, the gene fusion further comprises a linker nucleic acid sequence encoding an amino acid sequence that is specifically cleavable by an enzyme or a chemical, wherein the linker sequence is positioned between the oil-body-surface-avoiding linker amino acid sequence and said nucleic acid sequence encoding a redox fusion polypeptide. In this optional embodiment, also contemplated is the introduction of an enzyme or chemical that cleaves said redox fusion polypeptide from said oil body, thereby obtaining isolated redox fusion polypeptide. The first redox protein can be a thioredoxin and said second redox protein can be a thioredoxin-reductase. In one embodiment, the thioredoxin and thioredoxin-reductase can be obtained from Arabidopsis. In another embodiment, the first redox protein is at least 5 times more active when produced as a redox fusion polypeptide as compared to the production of the first redox protein without the second redox protein.

[0048] Also provided herein, for use with the various methods set forth herein is the formulation of an emulsion of the oil bodies associated with the redox fusion polypeptide for use in the preparation of a product capable of treating oxidative stress in a target, a product capable of chemically reducing a target, pharmaceutical composition, a personal care product or a food product. Accordingly, an emulsion formulation composition is provided.

[0049] Also provided herein is a chimeric nucleic acid comprising:

[0050] 1) a first nucleic acid sequence capable of regulating transcription in a host cell operatively linked to;

[0051] 2) a second nucleic acid sequence encoding a recombinant fusion polypeptide comprising (i) a nucleic acid sequence encoding a sufficient portion of an oil-body-protein to provide targeting of said recombinant fusion polypeptide to an oil body linked to (ii) a nucleic acid sequence encoding a redox fusion polypeptide comprising a first redox protein linked to a second redox protein operatively linked to;

[0052] 3) a third nucleic acid sequence capable of terminating transcription in said cell. The oil-body-protein can be an oleosin or a caleosin, the first redox protein can be a thioredoxin and said second redox protein can be a thioredoxin-reductase. In certain embodiments, positioned between said nucleic acid sequence encoding a sufficient portion of an oil-body-protein and said nucleic acid sequence encoding a redox fusion polypeptide is a linker nucleic acid sequence encoding a oil-body-surface-avoiding linker amino acid sequence. The oil-body-surface-avoiding linker amino acid sequence can be substantially negatively charged, or have a molecular weight of at least 35 kd. In one embodiment, the gene fusion optionally further comprises a linker nucleic acid sequence encoding an amino acid sequence that is specifically cleavable by an enzyme or a chemical, wherein the linker sequence is positioned between the oil-body-surface-avoiding linker amino acid sequence and said nucleic acid sequence encoding a redox fusion polypeptide.

[0053] Also provided herein are transgenenic plants, e.g., safflower plants, comprising any of the chimeric nucleic acid sequences and constructs described herein. The chimeric nucleic acids can be contained within a plastid. Accordingly, isolated plastids are provided having chimeric nucleic acids therein. Also provided are plant seeds comprising the chimeric nucleic acids provided herein.

[0054] Also provided are oil body preparations obtained using any of the methods provided herein, and food products, pharmaceutical compositions, and personal care products containing the oil body preparations. The products and/or compositions provided herein are capable of treating oxidative stress in a target, capable of chemically reducing a target. Also provided is a deteregent composition comprising an oil body preparation capable of chemically reducing a target, and related methods of cleansing an item, comprising administering such product to the item under conditions that promote cleansing.

[0055] Also provided herein are nucleic acid constructs comprising a gene fusion, wherein the gene fusion comprises a first region encoding an oil-body-protein or an active fragment thereof, operably linked to a second region encoding at least one thioredoxin-related protein or an active fragment thereof. In one embodiment, the at least one thioredoxin-related protein can be thioredoxin. The thioredoxin can be selected from the group consisting of SEQ ID NOs:38, 42, 46, 50 and SEQ ID NOs:52-194. The thioredoxin can be obtained from Arabidopsis or wheat.

[0056] In another embodiment, the at least one thioredoxin-related protein can be thioredoxin-reductase. The thioredoxin-reductase can selected from the group consisting of those set forth in SEQ ID NOs:8, 9, 10, 40, 44, 48, 50 and SEQ ID NOs:195-313 and/or derived from Arabidopsis or wheat. The thioredoxin-reductase can be an NADPH-dependent thioredoxin-reductase. The second region can encode a thioredoxin and thioredoxin-reductase. In one embodiment, the thioredoxin and thioredoxin-reductase is obtained from Mycobacterium leprae. In another embodiment, the at least one thioredoxin-related protein can be an engineered fusion protein. The first region can precede, in a 5′ to 3′ direction, the second region. Alternatively, the first region follows, in a 5′ to 3′ direction, the second region. The gene fusion can optionally further comprise a third region encoding a second thioredoxin-related protein or an active fragment thereof, operably linked to the first region, or to the second region, or to both. A seed-specific promoter, such as a phaseolin promoter, can be operably linked to the gene fusion. In one embodiment, at least one thioredoxin-related protein is derived from a plant species selected from the group consisting of Arabidopsis and wheat. In another embodiment, at least one thioreoxin-related protein can be derived from E. coli.

[0057] In one embodiment, the gene fusion further comprises a nucleic acid sequence encoding a oil-body-surface-avoiding linker amino acid sequence, wherein the linker amino acid sequence is positioned between the first region and the second region. The oil-body-surface-avoiding linker amino acid sequence can be substantially negatively charged, or have a molecular weight of at least 35 kd. In addition, the gene fusion can further comprise a linker nucleic acid sequence encoding an amino acid sequence that is specifically cleavable by an enzyme or a chemical, wherein the linker sequence is positioned between the oil-body-surface-avoiding linker amino acid sequence and the second region.

[0058] Also provided herein are transgenic plants containing a nucleic acid construct comprising a gene fusion, wherein the gene fusion comprises a region encoding an oil-body-protein or an active fragment thereof, operably linked to a region encoding a first thioredoxin-related protein or an active fragment thereof. The thioredoxin-related protein can be thioredoxin. The nucleic acid construct can be contained within a plastid. In one embodiment, when the first thioredoxin-related protein is thioredoxin and the construct can further comprise a region encoding a thioredoxin-reductase. The gene fusion can optionally further comprise a third region encoding a second thioredoxin-related protein or an active fragment thereof, operably linked to the first region, or to the second region, or to both. The gene fusion can further optionally further comprise a nucleic acid sequence encoding a oil-body-surface-avoiding linker amino acid sequence, wherein the nucleic acid encoding the linker amino acid sequence is positioned between the region encoding an oil-body-protein and the region encoding a first thioredoxin-related protein. The oil-body-surface-avoiding linker amino acid sequence can be substantially negatively charged, or have a molecular weight of at least 35 kd. The gene fusion can optionally further comprise a linker nucleic acid sequence encoding an amino acid sequence that is specifically cleavable by an enzyme or a chemical, wherein the linker sequence is positioned between the oil-body-surface-avoiding linker amino acid sequence and the region encoding a first thioredoxin-related protein.

[0059] Also provided is a transgenic plant comprising a nucleic acid construct, a seed-specific promoter operably linked to a gene fusion, wherein the gene fusion comprises a region encoding an oil-body-protein or an active fragment thereof, operably linked to a region encoding a first thioredoxin-related protein or an active fragment thereof, wherein a fusion protein comprising activities of oleosin and the thioredoxin-related protein is produced in a seed of the plant. In another embodiment, a thioredoxin-related protein having concentration of at least about 0.5% of total cellular seed protein is provided. Also provided herein is an extract comprising an activity of a thioredoxin-related protein. Also provided are oil bodies and/or oil obtained from various seeds.

[0060] Also provided herein are methods of making a fusion protein comprising a thioredoxin-related activity, the method comprising the steps of:

[0061] a) providing a transgenic plant comprising a nucleic acid construct comprising a seed-specific promoter operably linked to a gene fusion, wherein the gene fusion comprises a region encoding an oil-body-protein or an active fragment thereof, operably linked to a region encoding a first thioredoxin-related protein or an active fragment thereof, the gene fusion encoding a fusion protein comprising a thioredoxin-related activity;

[0062] b) obtaining seeds from the plant; and

[0063] c) recovering the fusion protein by isolating oil bodies from the seeds. In one embodiment, the oil bodies are fractionated to achieve partial purification of the fusion protein. The oil bodies can be in association with a fusion protein. The oil-body-protein can be cleaved from the thioredoxin-related protein after fractionation of the oil bodies. The cleaving step can make use of a protease or chemical proteolysis.

[0064] Also provided herein are methods of reducing allergenicity of a food comprising the steps of:

[0065] a) providing a preparation comprising oil bodies associated with a fusion protein, the fusion protein comprising an oil-body-protein or an active fragment thereof and a thioredoxin-related protein or an active fragment thereof; and

[0066] b) adding the preparation to the food, whereby allergenicity of the food is reduced due to activity of the thioredoxin-related protein or fragment. The food can be wheat flour, wheat dough, milk, cheese, yogurt and ice cream. In one embodiment, NADH is used as a co-factor in the substantial absence of NADPH.

[0067] Also provided herein are pharmaceutical compositions comprising a fusion protein, the fusion protein comprising an oil-body-protein or an active fragment thereof and a thioredoxin-related protein or an active fragment thereof, in a pharmaceutically acceptable carrier. The oil bodies can be associated with the fusion protein. Also provided is a cosmetic formulation comprising oil bodies associated with a fusion protein, the fusion protein comprising an oil-body-protein or an active fragment thereof and a thioredoxin-related protein or an active fragment thereof, in a pharmaceutically acceptable carrier. Also provided are methods of treating or protecting a target against oxidative stress, comprising the steps of:

[0068] a) providing a preparation comprising a fusion protein, the fusion protein comprising an oil-body-protein or an active fragment thereof and a thioredoxin-related protein or an active fragment thereof; and

[0069] b) contacting the preparation with a target, wherein the target is susceptible to oxidative stress, thereby treating or protecting against the stress. The target can be selected from the group consisting of a molecule, a molecular complex, a cell, a tissue, and an organ.

[0070] Also provided is a nucleic acid construct comprising a gene fusion, wherein the gene fusion comprises a first region encoding an oil-body-protein or an active fragment thereof, operably linked to a second region encoding at least one polypeptide or an active fragment thereof, and an oil-body-surface-avoiding linker in frame between the first and second region polypeptides. Also provided are methods of expressing this construct into the encoded amino acid sequence; and oil bodies, formulations, emulsions, cells, and plants comprising the construct and encoded amino acid sequence. These particular constructs, oil bodies, formulations, emulsions, cells, and plants can be produced according to the methods described herein. The second region can encode any polypeptied, for example, a therapeutically, nutritionally, industrially or cosmetically useful peptide as set forth herein. For example, the second region can encode a redox protein, an immunoglobulin, a thioredoxin-related protein or any one or more recombinant polypeptides of a multimeric-protein-complex.

[0071] Other features and advantages of the present invention will become readily apparent from the following detailed description. It should be understood however that the detailed description and the specific examples while indicating particular embodiments of the invention are given by way of illustration only.

### BRIEF DESCRIPTION OF THE DRAWINGS

[0072] FIG. 1 shows a ClustalW Formatted Alignment comparison of the published NADPH thioredoxin-reductase nucleic acid sequence (SEQ ID NO:9) (ATTHIREDB-Jacquot et al. J. Mol. Biol. (1994) 235 (4):1357-63.) with the sequence isolated herein in Example 1 (TR; SEQ ID NO:8).

[0073] FIG. 2 shows a ClustalW Formatted Alignment comparison of the deduced amino acid sequence of the published NADPH thioredoxin-reductase sequence (SEQ ID NO:12)(ATTHIREDB Jacquot et al. J. Mol. Biol. (1994) 235 (4):1357-63.) with the sequence isolated herein in Example 1 (TR; SEQ ID NO:13).

[0074] FIG. 3 shows a clustal alignment comparing the amino acid sequence of the Arabidopsis thaliana thioredoxin-reductase-linker-thioredoxin synthetic fusion (Arab TR-link-Trxh; SEQ ID NO:37) to the Mycobacterium leprae thioredoxin-reductase-thioredoxin natural fusion (M.lep TR/Trxh; SEQ ID NO:36) natural fusion. Overall, the proteins are approximately 50% identical at the amino acid level.

[0075] FIG. 4 is a bar graph showing the thioredoxin/thioredoxin-reductase activity measurements for the various transgenic Arabidopsis seed fractions. Relative specific activity is expressed as a percentage of the E. coli thioredoxin and thioredoxin-reductase activities. The numbered bars in the graph correspond to the following:

[0076] 1. W.T.+oleosin-thioredoxin

[0077] 2. W.T.+thioredoxin-oleosin

[0078] 3. W.T.+thioredoxin

[0079] 4. W.T.+oleosin-thioredoxin-reductase

[0080] 5. W.T.+thioredoxin-reductase-oleosin

[0081] 6. W.T.+thioredoxin-reductase

[0082] 7. thioredoxin+oleosin-thioredoxin-reductase

[0083] 8. thioredoxin+thioredoxin-reductase-oleosin

[0084] 9. thioredoxin+thioredoxin-reductase

[0085] 10. thioredoxin-reductase+oleosin-thioredoxin

[0086] 11. thioredoxin-reductase+thioredoxin-oleosin

[0087] 12. oleosin-M.lep TR/Trxh

[0088] 13. E. coli thioredoxin-reductase+thioredoxin

[0089] FIG. 5 provides a listing of exemplary proteins for use in the heteromultimeric-fusion-proteins and heteromultimeric-protein-complexes provided herein.

### DETAILED DESCRIPTION

[0090] As hereinbefore mentioned, the present invention relates to novel and improved methods for the production of multimeric proteins, including a first and second recombinant polypeptide, multimeric-protein-complexes, heteromultimeric-protein-complexes, multimeric-fusion-proteins, heteromultimeric-fusion-proteins, immunoglobulin-polypeptide-chains, immunoglobulins, redox-fusion-polypeptides, and a first and second thioredoxin-related protein; and related products. These methods permit the production of active multimeric-protein-complexes in association with oil bodies. The oil bodies in association with the multimeric-protein-complex may be used to prepare various useful emulsions.

[0091] Accordingly, provided herein are methods of producing a recombinant multimeric-protein-complex associated with an oil body, said method comprising:

[0092] (a) producing in a cell comprising oil bodies, a first recombinant polypeptide and a second recombinant polypeptide wherein said first recombinant polypeptide is capable of associating with said second recombinant polypeptide in the cell to form said multimeric-protein-complex; and

[0093] (b) associating said multimeric-protein-complex with an oil body through an oil-body-targeting-protein capable of associating with said oil body and said first recombinant polypeptide.

[0094] Definitions and Terms

[0095] Unless defined otherwise, all technical and scientific terms used herein have the same meaning as is commonly understood by one of skill in the art to which this invention belongs. Where permitted, all patents, applications, published applications and other publications and sequences from GenBank, SwissPro and other data bases referred to throughout in the disclosure herein are incorporated by reference in their entirety.

[0096] As used herein, the phrase “multimeric-protein-complex”, refers to two or more polypeptide chains that permanently or repeatedly interact or permanently or repeatedly coordinate to form a biologically active assembly comprising said two or more polypeptide chains. It should be noted that the polypeptides may be independently biologically active without interaction or coordination to form the complex. The multimeric-protein-complex may provide a biological structure, or it may be capable of facilitating a chemical or biological reaction. For example, one of the protein regions within the multimeric-protein-complex can repeatedly activate or repeatedly inactivate the biological or metabolic activity of one or more of the other proteins contained within the multimeric-protein-complex. In one embodiment, the first and second recombinant polypeptide contained in a multimeric-protein-complex may either associate or interact as independent non-contiguous polypeptide chains or the multimeric-protein-complex may be prepared as a fusion polypeptide (multimeric-fusion-protein) between the first and second recombinant polypeptide.

[0097] One example of a repeated (e.g., reoccurring) interaction or association between the two or more polypeptides of a multimeric-protein-complex provided herein is the interaction between two or more non-identical redox proteins to form a heteromultimeric-protein-complex. Exemplary redox proteins for use in this regard are thioredoxin and the thioredoxin-reductase. A further example is the interaction between two or more immunoglobulin-polypeptide-chains to form an immunoglobulin. As used herein, the phrase “heteromultimeric-protein-complex”, refers to two or more non-identical polypeptide chains that permanently or repeatedly interact or permanently or repeatedly coordinate to form a biologically active assembly comprising said two or more polypeptide chains. Other examples of multimeric-protein-complexes provided herein include a first and second recombinant polypeptide, heteromultimeric-protein-complexes, multimeric-fusion-proteins, heteromultimeric-fusion-proteins, immunoglobulins, first and second immunoglobulin-polypeptide-chains, redox-fusion-polypeptides, and a first and second thioredoxin-related protein.

[0098] The recombinant polypeptide or multimeric-protein-complex is associated with an oil body. As used herein, the phrase “oil body” or “oil bodies” refers to any oil or fat storage organelle in any cell type. Accordingly, the oil bodies may be obtained from any cell comprising oil bodies, including plant cells (described in for example: Huang (1992) Ann. Rev. Plant Mol. Biol. 43: 177-200), animal cells (described in for example: Murphy (1990) Prog Lipid Res 29(4): 299-324), including adipocytes, hepatocytes, steroigogenic cells, mammary epithelial cells, macrophages, algae cells (described in for example: Rossler (1988) J. Physiol. London, 24: 394-400) fungal cells, including yeast cells (described in for example Leber et al. (1994) Yeast 10: 1421-1428) and bacterial cells (described in for example: Pieper-Furst et al. (1994) J. Bacteriol. 176: 4328-4337). Generally the oil bodies used herein are oil bodies obtainable from plant cells and generally the oil bodies obtainable from plant seed cells.

[0099] As used herein, the phrase “is capable of associating with”, “associate” or grammatical variations thereof, refers to any interaction between two or more polypeptides, including any covalent interactions (e.g. multimeric-fusion-proteins) as well as non-covalent interactions. Exemplary non-covalent interactions can be between the oil-body-targeting-protein and a redox protein or immunoglobulin-polypeptide-chain, as well as between two or more different proteins contained within two or more separate oil-body-protein fusion proteins (e.g., the redox proteins in oleosin-thioredoxin and oleosin-thioredoxin-reductase).

[0100] As used herein, the term “recombinant” (also referred to as heterologous) in the context of recombinant proteins and amino acids, means “of different natural origin” or represents a non-natural state. For example, if a host cell is transformed with a nucleotide sequence derived from another organism, particularly from another species, that nucleotide sequence and amino acid sequence encoded thereby, is recombinant (heterologous) with respect to that host cell and also with respect to descendants of the host cell which carry that gene. Similarly, recombinant (or heterologous) refers to a nucleotide sequence derived from and inserted into the same natural, original cell type, but which is present in a non-natural state, e.g., a different copy number, or under the control of different regulatory elements. A transforming nucleotide sequence may include a recombinant coding sequence, or recombinant regulatory elements. Alternatively, the transforming nucleotide sequence may be completely heterologous or may include any possible combination of heterologous and endogenous nucleic acid sequences.

[0101] In various embodiments of the present invention, the first and/or second recombinant polypeptides, multimeric-protein-complexes, heteromultimeric-protein-complexes, multimeric-fusion-proteins, heteromultimeric-fusion-proteins, immunoglobulins, immunoglobulin-polypeptide-chains, redox-fusion-polypeptides, and/or thioredoxin-related proteins, are produced in a cell comprising oil bodies. As used herein the phrase “in a cell”, “in the cell”, or grammatical variations thereof, mean that the first and/or second recombinant polypeptides, multimeric-protein-complexes, heteromultimeric-protein-complexes, multimeric-fusion-proteins, heteromultimeric-fusion-proteins, immunoglobulins, immunoglobulin-polypeptide-chains, redox-fusion-polypeptides, and/or thioredoxin-related proteins, may be produced in any cellular compartment of that cell, so long as that cell comprises oil bodies therein. In embodiments of the invention in which plant cells are used, the phrase is intended to include the plant apoplast.

[0102] In various embodiments provided herein, the first and/or second recombinant polypeptides, multimeric-protein-complexes, heteromultimeric-protein-complexes, multimeric-fusion-proteins, heteromultimeric-fusion-proteins, immunoglobulins, immunoglobulin-polypeptide-chains, redox-fusion-polypeptides, and thioredoxin-related proteins, associate with an oil body through an oil-body-targeting-protein. As used herein, the phrase “oil-body-targeting-protein” refers to any protein, protein fragment or peptide capable of associating with an oil body. Exemplary oil-body-targeting-proteins for use herein include oil-body-proteins, such as oleosin and caleosin; immunoglobulins, such as bi-specific antibodies; and the like.

[0103] In embodiments described herein in which an oil-body-protein is used, the first and/or second recombinant polypeptides, multimeric-protein-complexes, heteromultimeric-protein-complexes, multimeric-fusion-proteins, heteromultimeric-fusion-proteins, immunoglobulins, immunoglobulin-polypeptide-chains, redox-fusion-polypeptides, and thioredoxin-related proteins, are generally fused to the oil-body-protein. The term “oil-body-protein” refers to any protein naturally present in cells and having the capability of association with oil bodies, including any oleosin or caleosin.

[0104] Accordingly, provided herein a method of expressing a recombinant multimeric-protein-complex comprising a first and second recombinant polypeptide in a cell, said method comprising:

[0105] (a) introducing into a cell a first chimeric nucleic acid sequence comprising:

[0106] (i) a first nucleic acid sequence capable of regulating transcription in said cell operatively linked to;

[0107] (ii) a second nucleic acid sequence encoding a first recombinant polypeptide, such as a redox protein, an immunoglobulin-polypeptide-chain or an thioredoxin-related protein, fused to an oil-body-protein;

[0108] (b) introducing into said cell a second chimeric nucleic acid sequence comprising:

[0109] (i) a third nucleic acid sequence capable of regulating transcription in said cell operatively linked to;

[0110] (ii) a fourth nucleic acid sequence encoding a second recombinant polypeptide, such as a second redox protein, a second immunoglobulin-polypeptide-chain or a second thioredoxin-related protein,;

[0111] (c) growing said cell under conditions to permit expression of said first and second recombinant polypeptide in a progeny cell comprising oil bodies wherein said first recombinant polypeptide and said second recombinant polypeptide are capable of forming a multimeric-protein-complex, preferably in said progeny cell; and

[0112] (d) associating said first recombinant polypeptide with an oil body through said oil-body-protein.

[0113] The term “nucleic acid” as used herein refers to a sequence of nucleotide or nucleoside monomers consisting of naturally occurring bases, sugars and intersugar (backbone) linkages. The term also includes modified or substituted sequences comprising non-naturally occurring monomers or portions thereof, which function similarly. The nucleic acid sequences may be ribonucleic acids (RNA) or deoxyribonucleic acids (DNA) and may contain naturally occurring bases including adenine, guanine, cytosine, thymidine and uracil. The sequences also may contain modified bases such as xanthine, hypoxanthine, 2-aminoadenine, 6-methyl, 2-propyl and other alkyl adenines, 5-halo-uracil, 5-halo cytosine, 6-aza uracil, 6-aza cytosine and 6-aza thymine, pseudo uracil, 4-thiouracil, 8-halo adenine, 8-amino adenine, 8-thiol-adenine, 8-thio-alkyl adenines, 8-hydroxyl adenine and other 8-substituted adenines, 8-halo guanines, 8 amino guanine, 8 thiol guanine, 8-thioalkyl guanines, 8 hydroxyl guanine and other 8-substituted guanines, other aza and deaza uracils, thymidines, cytosines, adenines, or guanines, 5-trifluoromethyl uracil and 5-trifluoro cytosine.

[0114] Multmeric-Protein-Complexes

[0115] In accordance with the methods and compositions provided herein, any two recombinant polypeptides capable of forming a multimeric-protein-complex may be used. The nucleic acid sequences encoding the two recombinant polypeptides may be obtained from any biological source or may be prepared synthetically. In general nucleic acid sequence encoding multimeric proteins are known to the art and readily available. Known nucleic acid sequences encoding multimeric-protein-complexes may be used to design and construct nucleic acid sequence based probes in order to uncover and identify previously undiscovered nucleic acid sequences encoding multimeric-protein-complexes, for example, by screening cDNA or genomic libraries or using 2- or multi-hybrid systems. Thus, additional nucleic acid sequences encoding multimeric-protein-complexes may be discovered and used as described herein.

[0116] The first and/or second recombinant polypeptides that are comprised within a multimeric-protein-complex provided herein, can themselves be in the form of heteromultimeric-protein-complexes, multimeric-fusion-proteins, heteromultimeric-fusion-proteins, immunoglobulins, immunoglobulin-polypeptide-chains, redox-fusion-polypeptides, and/or a first and/or second thioredoxin-related protein.

[0117] The nucleic acid sequence encoding the first and second recombinant polypeptide, heteromultimeric-protein-complexes, multimeric-fusion-proteins, heteromultimeric-fusion-proteins, immunoglobulins, immunoglobulin-polypeptide-chains, redox-fusion-polypeptides, and/or a first and/or second thioredoxin-related protein may be obtained from separate sources or may be obtained from the same source. In general however, such nucleic acid sequence is obtained from the same or a similar biological source. In certain embodiments wherein the nucleic acid sequence encoding the first and second recombinant polypeptide protein are obtained from the same source, the nucleic acid sequence encoding the first recombinant polypeptide and second recombinant polypeptide may be naturally fused. In accordance with a particular embodiment, the nucleic acid sequences encoding the first and second recombinant polypeptide are obtained from a plant source.

[0118] Oil-Body-Surface-Avoiding Linkers

[0119] Polypeptide spacers or linkers of variable length and/or negative charge can be used herein to separate the first and/or second recombinant polypeptides, multimeric-protein-complexes, heteromultimeric-protein-complexes, multimeric-fusion-proteins, heteromultimeric-fusion-proteins, immunoglobulins, immunoglobulin-polypeptide-chains, redox-fusion-polypeptides, and the first and/or second thioredoxin-related proteins from the in-frame oil-body-targeting-protein, to improve activity of and/or the accessibility of the polypeptide or complex. For example, in one embodiment set forth herein, positioned between a nucleic acid sequence encoding a sufficient portion of an oil-body-protein and a nucleic acid sequence encoding either the first and/or second recombinant polypeptides, multimeric-protein-complexes, heteromultimeric-protein-complexes, multimeric-fusion-proteins, heteromultimeric-fusion-proteins, immunoglobulins, immunoglobulin-polypeptide-chains, redox-fusion-polypeptides, and the first and/or second thioredoxin-related proteins; is a linker nucleic acid sequence encoding an oil-body-surface-avoiding linker amino acid sequence.

[0120] Oil-body-surface-avoiding linkers are positioned between the oil-body targeting sequence and an in-frame recombinant polypeptide of interest, e.g., the multimeric-protein-complexes provided herein, serve to increase the distance and or decrease the interaction between the negatively charged oil body surface and the recombinant polypeptide of interest. A negatively charged linker is repelled by the negatively charged oil body surface, in turn increasing the distance or decreasing the interaction of its attached recombinant polypeptide with the oil body surface. As a consequence of the increased distance from the oil body surface, the recombinant polypeptide will be more accessible, e.g. to its target(s) substrate, protein substrate, protein partner, and less affected by the charged oil body surface. Exemplary linker sequences for use herein can be either a negatively charged linker, or a linker having a molecular weight of at least about 35 kd or more.

[0121] As used herein, a “negatively charged linker” sequence, refers to any amino acid segment, or nucleic acid encoding such, that has a pl less than or equal to the pl of an oil body. In certain embodiments, the pl of the negatively charged linker is about 90%, 80%, 70%, 60%, 50%, 40%, 30%, down to about 25% or more, below that of the pl of an oil body in the particular plant or cell system being used. Exemplary negatively charged linkers can be prepared comprising any combination of the negatively charged amino acid residues. For example, in one embodiment, a negatively charged linker comprises either a poly-glutamate or poly-aspartate sequence, or any combination of both amino acid residues. The negatively charged linker is typically at least 5, 10, 15, 20, 25, 30, 35, 40, 45, 50, 55, 60, 65, 70, 75, 80, 85, 90, 95, 100 or more amino acids in length. The negatively charged linkers are preferably non-proteolytic (e.g., non-proteolytic linkers), having no site for efficient proteolysis. When linker size rather than charge is used to minimize interaction of the recombinant polypeptide of interest with the oil body surface, then the linker is non-proteolytic and ranges in molecular weight from about 35 kd up to about 100 kd. The upper size limit is chosen such that the expression of, the activity of, the conformation of, and/or the access to target of, the recombinant polypeptide of interest is not significantly affected by the linker.

[0122] In certain embodiments, described herein where a non-proteolytic linker amino acid sequence is employed, the gene fusion or protein fusion (multimeric-fusion-protein) can optionally further comprise a linker nucleic or amino acid sequence encoding a sequence that is specifically cleavable by an enzyme or a chemical, wherein the linker sequence is positioned between the non-proteolytic linker sequence and sequence encoding the desired recombinant protein region, e.g., the first and/or second recombinant polypeptides, multimeric-protein-complexes, heteromultimeric-protein-complexes, multimeric-fusion-proteins, heteromultimeric-fusion-proteins, immunoglobulins, immunoglobulin-polypeptide-chains, redox-fusion-polypeptides, or the first and/or second thioredoxin-related proteins set forth herein. When a cleavable linker sequence is used herein, in a particular embodiment, it is further downstream than the non-proteolytic linker sequence from the oil-body-targeting-protein region of the fusion protein. By virtue of cleavable linker, the recombinant fusion polypeptides provided herein, such as the multimeric-fusion-proteins and redox fusion polypeptides, can be isolated and purified by introducing an enzyme or chemical that cleaves said multimeric-fusion-protein and/or redox fusion polypeptide from said oil body, thereby obtaining and/or isolating the desired protein. It is contemplated herein that the use of cleavable linker sequence downstream of the non-proteolytic linker/spacer sequence will improve the yield of protein recovery when isolating or purifying proteins using the methods provided herein.

[0123] The nucleic acid sequences encoding the first or second recombinant polypeptide may be altered to improve expression levels for example, by optimizing the nucleic acids sequence in accordance with the preferred codon usage for the particular cell type which is selected for expression of the first and second recombinant polypeptide, or by altering of motifs known to destabilize mRNAs (see for example: PCT Patent Application 97/02352). Comparison of the codon usage of the first and second recombinant polypeptide with codon usage of the host will enable the identification of codons that may be changed. For example, typically plant evolution has tended towards a preference for CG rich nucleotide sequences while bacterial evolution has resulted in bias towards AT rich nucleotide sequences. By modifying the nucleic acid sequences to incorporate nucleic acid sequences preferred by the host cell, expression may be optimized. Construction of synthetic genes by altering codon usage is described in for example PCT patent Application 93/07278. The first and second recombinant polypeptide can be altered using for example targeted mutagenesis, random mutagenesis (Shiraishi et al. (1998) Arch. Biochem. Biophys. 358: 104-115; Galkin et al. (1997) Protein Eng. 10: 687-690; Carugo et al. (1997) Proteins 28: 10-28; Hurley et al. (1996) Biochemistry 35: 5670-5678), gene shuffling, and/or by the addition of organic solvent (Holmberg et al. (1999) Protein Eng. 12: 851-856). Any polypeptide spacers that are used in accordance with the methods and products provided herein may be altered in similar ways.

[0124] In particular embodiments provided herein, the recombinant polypeptides or thioredoxin-related proteins capable of forming a multimeric-protein-complex are capable of forming a heteromultimeric-protein-complex. Examples of heteromultimeric-protein-complexes that contain polypeptide chains that repeatedly interact, either to activate, inactivate, oxidize, reduce, stabilize, etc., with one another, that can be produced in association with oil bodies using the methods provided herein include those set forth in FIG. 5. Accordingly, exemplary proteins for use in the heteromultimeric-protein-complexes and nucleic acid constructs encoding such, provided herein include, among others described herein, those set forth in FIG. 5.

[0125] Other polypeptide regions that can be used in the first and/or second recombinant polypeptides, multimeric-protein-complexes, heteromultimeric-protein-complexes, multimeric-fusion-proteins, heteromultimeric-fusion-proteins, immunoglobulins, immunoglobulin-polypeptide-chains, redox-fusion-polypeptides, or the first and/or second thioredoxin-related proteins, provided herein include, among other, those immunoglobulin regions set forth in Table 1.

TABLE 1
ANTIBODY HETERODIMERS

| Class or molecule | Subunits |
|---|---|
| Fab | Variable region and first constant region |
| | of heavy chain and complete light chain |
| Fv | Variable regions of heavy and light |
| | antibody chains |
| IgA | heavy chains, light chains and J (joining) |
| | chain |
| IgG, IgD, IgE | heavy and light chains |
| IgM | heavy chains, light chains and J (joining) |
| | chain |
| Antibody chain(s) and a toxin | Antibody chain(s) and a toxin |
| Autoantigens, allergens and | Autoantigens, allergens and transplant |
| transplant antigens with an | antigens with an adjuvant or tolerogen |
| adjuvant or tolerogen | |
| Chimeras using antibody Fc | Receptor subunits fused to the constant |
| domain | region of antibody heavy chains |

[0126] As set forth above, in one embodiment, exemplary heteromultimeric-protein-complexes and exemplary heteromultimeric-fusion-proteins provided herein comprise redox proteins, such as the thioredoxins and thioredoxin-reductases and immunoglobulins.

[0127] Oil-Body-Targeting-Proteins

[0128] The nucleic acid sequence encoding the oil-body-targeting-protein that may be used in the methods and compositions provided herein may be any nucleic acid sequence encoding an oil-body-targeting-protein, protein fragment or peptide capable of association with first recombinant polypeptide, heteromultimeric-protein-complexes, multimeric-fusion-proteins, heteromultimeric-fusion-proteins, immunoglobulins, immunoglobulin-polypeptide-chains, redox-fusion-polypeptides, and/or a first and/or second thioredoxin-related protein and the oil bodies. The nucleic acid sequence encoding the oil body targeting peptide may be synthesized or obtained from any biological source.

[0129] For example, in one embodiment the oil-body-targeting-protein is an immunoglobulin or an immunoglobulin derived molecule, for example, a bispecific single chain antibody. The generation of single chain antibodies and bi-specific single chain antibodies is known to the art (see, e.g., U.S. patents U.S. Pat. No. 5,763,733, U.S. Pat. No. 5,767,260 and U.S. Pat. No. 5,260,203). Nucleic acid sequences encoding single chain antibodies functioning as oil-body-targeting-proteins may be prepared from hybridoma cell lines expressing monoclonal antibodies raised against an oleosin as described by Alting-Mees et al (2000) IBC's Annual International Conference on Antibody Engineering, Poster #1. In order to attain specificity for the first recombinant polypeptide a nucleic acid sequence encoding a second single chain antibody prepared from a monoclonal raised against the first recombinant polypeptide may be prepared and linked to the anti-oleosin single chain antibody. In this embodiment the oil body associates with the first recombinant polypeptide through non-covalent interactions of the oil-body-targeting-protein with the first recombinant polypeptide and the oil body. Alternatively the first recombinant polypeptide may be prepared as a fusion protein with an oil-body-targeting-protein. For example, a nucleic acid sequence encoding a single chain antibody raised against an oleosin may be fused to a nucleic acid sequence encoding the first recombinant polypeptide

[0130] Non-immunoglobulin-based oil-body-targeting-proteins capable of association with the first recombinant polypeptide may be discovered and prepared using for example phage display techniques (Pharmacia Biotech Catalogue Number 27-9401-011 Recombinant Phage Antibody System Expression Kit).

[0131] Oil-body-targeting-proteins may also be chemically modified. For example, oleosins may be modified by changing chemical modification of the lysine residues using chemical agents such as biotinyl-N-hyrdoxysuccinimide ester resulting in a process referred to as biotinylation. Conveniently this is accomplished by in vitro biotinylation of the oil bodies. In vivo biotinylation may be accomplished using the biotinylation domain peptide from the biotin carboxy carrier protein of E. coli acetyl-CoA carboxylase (Smith et al. (1998) Nucl. Acids. Res. 26: 1414-1420). Avidin or streptavidin may subsequently be used to accomplish association of the redox protein with the oil body.

[0132] In a particular embodiment the oil-body-targeting-protein is an oil-body-protein such as for example an oleosin or a caleosin or a sufficient portion derived thereof capable of targeting to an oil body. Nucleic acid sequences encoding oleosins are known to the art. These include for example the Arabidopsis oleosin (van Rooijen et al (1991) Plant Mol. Bio. 18:1177-1179); the maize oleosin (Qu and Huang (1990) J. Biol. Chem. Vol. 265 4:2238-2243); rapeseed oleosin (Lee and Huang (1991) Plant Physiol. 96:1395-1397); and the carrot oleosin (Hatzopoulos et al (1990) Plant Cell Vol. 2, 457-467.). Caleosin nucleic acid sequences are also known to the art (Naested et al (2000) Plant Mol Biol. 44(4):463-476; Chen et al (1999) Plant Cell Physiol. 40(10):1079-1086). Animal cell derived oil body proteins that may be used herein include adopihilin (Brasaemle et al, (1997) J. Lipid Res., 38: 2249-2263; Heid et al. (1998) Cell Tissue Research 294: 309-321), perilipin (Blanchette-Mackie et al. (1995), J. Lipid Res. 36: 1211-1226; Servetnick et al. (1995) J. Biol. Chem. 270: 16970-16973), apolipoproteins such as apo A-I, A-II, A-IV, C-I, C-II, CIII (Segrest et al. (1990), Proteins 8:103-117) and apoB (Chatterton et al. (1995) J. Lipid Res. 36: 2027-2037; Davis, R A in: Vance D E, Vance J. editors. Lipoprotein structure and secretion. The Netherlands, Elsevier, 191: 403-426.

[0133] In one embodiment, the first recombinant polypeptide is fused to an oil-body-protein. The methodology is further described in U.S. Pat. No. 5,650,554, which is incorporated herein by reference in its entirety. The first recombinant polypeptide may be fused to the N-terminus as well as to the C-terminus of the oil-body-protein (as described in: Moloney and van Rooijen (1996) INFORM 7:107-113) and fragments of the oil-body-protein such as for example the central domain of an oleosin molecule, or modified versions of the oil-body-protein may be used. In this embodiment, the second recombinant polypeptide is expressed intracellularly and then intracellularlly associates with the first recombinant polypeptide to form the multimeric-protein-complex in the cell. Oil bodies comprising the multimeric-protein-complex are then conveniently isolated from the cells.

[0134] In a further embodiment both the first and second recombinant polypeptide are separately fused to an oil-body-protein. In this embodiment nucleic acid sequences encoding the first and second polypeptides may be prepared separately and introduced in separate cell lines or they may be introduced in the same cell lines. Where the nucleic acid sequences are introduced in the same cell line, these nucleic acid sequence may be prepared using two separate expression vectors, or they may be prepared using a single vector comprising nucleic acid sequences encoding both the first polypeptide fused to an body protein and the second polypeptide fused to an oil-body-protein. Where separate cell lines are used subsequent mating of the offspring (e.g. mating of plants) is used to prepare a generation of cells comprising oil bodies which comprise both the first and second recombinant polypeptide fused to an oil-body-protein.

[0135] In further alternate embodiment, the first and second recombinant polypeptide are fused to form a multimeric-fusion-protein comprising the multimeric-protein-complex. In such an embodiment, the first and second polypeptide is associated with the oil body through an oil-body-targeting-protein capable of associating with both the fusion protein and with the oil body. In a particular embodiment, the fusion protein comprising the multimeric-protein-complex is fused to an oil-body-protein, for example, an oleosin or caleosin.

[0136] In embodiments provided herein in which the multimeric-protein-complex is an immunoglobulin (e.g., a multimeric-immunoglobulin-complex), a particularly preferred oil body targeting protein is an oleosin or caleosin associated with an immunoglobulin binding protein, such as for example protein A (U.S. Pat. No. 5,151,350), protein L (U.S. Pat. No. 5,965,390) and protein G (U.S. Pat. No. 4,954,618), or active fragments of such immunoglobulin binding proteins.

[0137] New oil-body-proteins may be discovered for example by preparing oil bodies (described in further detail below) and identifying proteins in these preparations using for example SDS gel electrophoresis. Polyclonal antibodies may be raised against these proteins and used to screen cDNA libraries in order to identify nucleic acid sequences encoding oil-body-proteins. The methodologies are familiar to the skilled artisan (Huynh et al. (1985) in DNA Cloning Vol. 1. a Practical Approach ed. D M Glover, IRL Press, pp 49-78). New oil-body-proteins may further be discovered using known nucleic acid sequences encoding oil-body-proteins (e.g. the Arabidopsis, rapeseed, carrot and corn nucleic acid sequences) to probe for example cDNA and genomic libraries for the presence of nucleic acid sequences encoding oil-body-proteins.

[0138] In one embodiment, the first and second polypeptide are a first and second redox protein. Accordingly, one embodiment provided herein relates to novel and improved methods for the production of redox proteins. It has unexpectedly been found that a redox protein when prepared as a fusion protein with a second redox protein is fully enzymatically active when produced in association with an oil body. In contrast, when the redox protein is prepared without the second redox protein it has reduced enzymatic activity. In one embodiment, the first redox protein is at least 5 times more active when produced as a redox fusion polypeptide relative to production as a non-fusion polypeptide.

[0139] Accordingly, provided herein are methods for producing an oil body associated with a heteromultimeric redox protein complex, said method comprising:

[0140] (a) producing in a cell comprising oil bodies, a first redox protein and a second redox protein wherein said first redox protein is capable of interacting with said second redox protein, preferably in the cell, to form said heteromultmeric redox protein complex; and

[0141] (b) associating said heteromultimeric redox protein complex with an oil body through an oil-body-targeting-protein capable of associating with said oil bodies and said heteromultimeric redox protein complex.

[0142] In a particular embodiment the first and second redox protein are prepared as a fusion protein to form a redox fusion polypeptide. Accordingly, provided herein are methods for preparing an enzymatically active redox protein associated with oil bodies comprising:

[0143] a) producing in a cell a redox fusion polypeptide comprising a first redox protein linked to a second redox protein;

[0144] b) associating said redox fusion polypeptide with oil bodies through an oil-body-targeting-protein capable of associating with said redox fusion polypeptide and said oil bodies; and

[0145] c) isolating said oil bodies associated with said redox fusion polypeptide. The oil bodies in association with the redox protein may be used to prepare a variety of useful emulsions.

[0146] As used herein the phrase “redox proteins” or grammatical variations thereof, refers to any protein or active protein fragment capable of participating in electron transport. For example, redox proteins are capable of catalyzing the transfer of an electron donor (also frequently referred to as the reducing agent) to an electron acceptor (also frequently referred to as the oxidizing agent). In the process of electron transfer, the reducing agent (electron donor) is oxidized and the oxidizing agent (electron acceptor) is reduced. Exemplary redox proteins for use herein include iron-sulfur proteins, cytochromes, redox active thiol proteins and redox-active flavoproteins. To carry out their function as conduits for electron donors, redox proteins, such as thioredoxin and thioredoxin-reductase for example, are known to function by interacting or associating with one another in multimeric-protein-complexes (e.g., heteromultimeric-protein-complexes).

[0147] The term “redox fusion polypeptide” as used herein refers to any fusion polypeptide comprising a first redox protein linked to a second redox protein (e.g., an in-frame translational fusion). The redox proteins that may be used with the methods and compositions provided herein may be any redox protein. In one embodiment the first and second redox proteins are a pair of redox proteins that would normally occur together from the same source, in nature. In a particular embodiment, the first redox protein is a thioredoxin and the second redox protein is a thioredoxin-reductase.

[0148] The redox fusion polypeptide may be produced in any cell comprising oil bodies, including any animal cell, plant cell, algae cell, fungal cell or bacterial cell. In certain embodiments the redox fusion polypeptide is produced in a plant cell and in particular embodiments the redox fusion polypeptide is produced in the seed cells of a seed plant.

[0149] In particular embodiments the oil-body-targeting-protein that is used is an oil-body-protein. In embodiments of the present invention in which an oil-body-protein is used, the first and second redox protein are preferably covalently fused to the oil-body-protein. Accordingly, provided herein are methods for the preparation of a redox protein in association with an oil body comprising:

[0150] a) introducing into a cell a chimeric nucleic acid sequence comprising:

[0151] 1) a first nucleic acid sequence capable of regulating transcription in said cell operatively linked to;

[0152] 2) a second nucleic acid sequence encoding a recombinant fusion polypeptide comprising (i) a first nucleic acid sequence encoding a sufficient portion of an oil-body-protein to provide targeting of said recombinant fusion polypeptide to an oil body linked in reading frame to (ii) a second nucleic acid sequence encoding a redox fusion polypeptide comprising a first redox protein linked to a second redox protein operatively linked to;

[0153] 3) a third nucleic acid sequence capable of terminating transcription in said cell;

[0154] b) growing said cell under conditions to permit expression of said redox fusion polypeptide in a progeny cell comprising oil bodies; and

[0155] c) isolating said oil bodies comprising said redox fusion polypeptide from said progeny cell.

[0156] Redox Proteins

[0157] In accordance with various methods and compositions provided herein, any nucleic acid sequence encoding a redox protein may be used. The nucleic acid sequence encoding the first and/or second redox protein may be obtained from any biological source or may be prepared synthetically. In general, nucleic acid sequences encoding redox proteins are well known in the art and readily available. See, for example: Cristiano et al. (1993) Genomics 17: (2) 348-354, Doyama et al. (1998) Plant Sci. 137: 53-62, Hoeoeg et al. (1984) Biosci. Rep. 4: 917-923; as well as the Swiss Protein sequences set forth in Table 5. Known nucleic acid sequences encoding redox proteins may be used to design and construct nucleic acid sequence based probes in order to uncover and identify previously undiscovered nucleic acid sequences encoding redox proteins, for example by screening cDNA or genomic libraries. Thus, additional nucleic acid sequences may be discovered and used in accordance with the present invention.

[0158] The nucleic acid sequence encoding the first and/or second redox protein may be obtained from separate sources or may be obtained from the same source. In general however, the nucleic acid sequence encoding a redox-fusion polypeptide comprises nucleic acid sequences encoding a first and a second redox protein obtained from the same or a similar biological source. In certain embodiments provided herein, wherein the nucleic acid sequence encoding the first and second redox protein is obtained from the same source, the nucleic acid sequence encoding the first redox protein and second redox protein may be naturally fused. In accordance with a particular embodiment, the nucleic acid sequences encoding the first and second redox protein are preferably obtained from a plant source.

[0159] As set forth above, a polypeptide spacer or linker of variable length may separate the first and second redox proteins from each other and/or from the oil-body-targeting-protein; and additional redox proteins (e.g., one or more) may be fused to the first and/or second redox protein.

[0160] The nucleic acid sequences encoding the redox proteins may be altered to improve expression levels for example by optimizing the nucleic acids sequence in accordance with the preferred codon usage for the particular cell type which is selected for expression of the redox proteins, or by altering of motifs known to destabilize mRNAs (see for example: PCT Patent Application 97/02352). Comparison of the codon usage of the redox protein with codon usage of the host will enable the identification of codons that may be changed. For example, typically plant evolution has tended towards a preference for CG rich nucleotide sequences while bacterial evolution has resulted in bias towards AT rich nucleotide sequences. By modifying the nucleic acid sequences to incorporate nucleic acid sequences preferred by the host cell, expression may be optimized. Construction of synthetic genes by altering codon usage is described in for example PCT patent Application 93/07278. The redox proteins may be altered using for example, targeted mutagenesis, random mutagenesis (Shiraishi et al. (1998) Arch. Biochem. Biophys. 358: 104-115; Galkin et al. (1997) Protein Eng. 10: 687-690; Carugo et al. (1997) Proteins 28: 10-28; Hurley et al. (1996) Biochemistry 35: 5670-5678) (and/or by the addition of organic solvent (Holmberg et al. (1999) Protein Eng. 12: 851-856). The polypeptide spacer between the first and second redox protein may be altered in similar ways.

[0161] The first and second redox protein may be selected by developing a two-dimensional matrix and determining which combination of first and second redox protein is most effective in electron transport using for example, a colorometric reduction assay (Johnson et al (1984) J. of Bact. Vol. 158 3:1061-1069, Luthman et al (1982) Biochemistry Vol 21 26:6628-2233). Combinations of thioredoxin and thioredoxin-reductase may be tested by determining the reduction of wheat storage proteins and milk storage protein beta-lactoglobulin in vitro (Del Val et al. (1999) J. Allerg. Clin. Immunol. 103: 690-697). Using the same strategy polypeptide spacers between the first and second redox proteins may be evaluated for their efficiency.

[0162] First and second redox proteins that may be used herein include without limitation any first redox protein and second redox protein selected from the group of redox proteins consisting of cytochromes, such as cytochrome a, cytochrome b and cytochrome c; porphyrin containing proteins, for example haemoglobin; iron-sulfur proteins, such as ferredoxin; flavoproteins such as thioredoxin-reductase, NADH dehydrogenase, succinate dehydrogenase, dihydrolipoyl dehydrogenase, acyl-CoA dehydrogenase, D-amino acid oxidase, xanthine oxidase, orotate reductase and aldehyde oxidase; pyridine-linked dehydrogenases, for example, lactate dehydrogenase, glyceraldehyde-3-phosphate dehydrogenase, malate dehydrogenase, and beta-hydroxy-butarate dehydrogenase; and redox active thiol containing proteins such as thioredoxin.

[0163] In particular embodiments, the redox proteins provided herein are thioredoxin and its reductant thioredoxin-reductase (which are jointly also referred to herein as “thioredoxin-related” protein(s)). As used herein, the term “thioredoxin” refers to relatively small proteins (typically approximately 12 kDa) that belong to the family of thioltransferases which catalyze oxido-reductions via the formation or hydrolysis of disulfide bonds and are widely, if not universally, distributed throughout the animal plant and bacterial kingdom. The reduces form of thioredoxin is an excellent catalyst for the reduction of even the most intractable disulfide bonds. In order to reduce the oxidized thioredoxin, two cellular reductants provide the reduction equivalents: reduced ferredoxin and NADPH. These reduction equivalents are supplied to thioredoxin via interaction or association with different thioredoxin-reductases including the NADPH thioredoxin-reductase and ferredoxin thioredoxin-reductase. The supply of these reduction equivalents requires the formation of a heteromultimeric-protein-complex comprising thioredoxin and thioredoxin-reductase. Ferredoxin thioredoxin-reductase is involved in the reduction of plant thioredoxins designated as Trxf and Trxm, both of which are involved in the regulation of photosynthetic processes in the chloroplast. The NADPH/thioredoxin active in plant seeds is designated Trxh (also referred to herein as thioredoxin h-type) and is capable of the reduction of a wide range of proteins thereby functioning as an important cellular redox buffer. Generally, only one kind of thioredoxin, which analogous to the plant Trxh type, is found in bacterial or animal cells. The h-type thioredoxins are capable of being reduced by NADPH and NADPH-thioredoxin reductase.

[0164] Exemplary thioredoxins are further characterized as a protein having a core of 5 beta-sheets surrounded by 4 to 6 alpha helixes. Exemplary thioredoxins are further characterized by having an active site containing the consensus amino acid sequence:

X C Y Y C Z,

[0165] wherein Y is any amino acid, such as hydrophobic or non-polar amino acids,

[0166] wherein X can be any of the 20 amino acids, preferably a hydrophobic amino acid, such as a tryptophan, and

[0167] Z can be any amino acid, preferably polar amino acids.

[0168] In certain embodiments, the thioredoxins for use herein comprise an active site having the amino acid sequence X C G P C Z. When the cysteines in the active site of thioredoxin or thioredoxin-like proteins are oxidized, they form an intramolecular disulfide bond. In the reduced state, the same active sites are capable of participating in redox reactions through the reversible oxidation of its active site dithiol, to a disulfide and catalyzes dithioldisulfide exchange reactions.

[0169] Exemplary thioredoxins are well-known in the art and can be obtained from several organisms including Arabidopsis thaliana (Riveira Madrid et al. (1995) Proc. Natl. Acad. Sci. 92: 5620-5624), wheat (Gautier et al. (1998) Eur. J. Biochem. 252: 314-324); Escherichia coli (Hoeoeg et al (1984) Biosci. Rep. 4: 917-923) and thermophylic microorganisms such as Methanococcus jannaschii and Archaeoglobus fulgidus (PCT Patent Application 00/36126). Thioredoxins have also been recombinantly expressed in several host systems including bacteria (Gautier et al. (1998) Eur J. Biochem. 252: 314-324) and plants (PCT Patent Application WO 00/58453) Commercial preparations of E. coli sourced Thioredoxins are readily available from for example: Sigma Cat No. T 0910 Thioredoxin (E. coli, recombinant; expressed in E. coli).

[0170] Exemplary nucleic acid sequences encoding thioredoxin polypeptides for use herein are readily available from a variety of diverse biological sources including E. coli (Hoeoeg et al. (1984) Biosci. Rep.: 4 917-923); Methanococcus jannaschii and Archaeoglobus fulgidus (PCT Patent Application 00/361 26); Arabidopsis thaliana (Rivera-Madrid (1995) Proc. Natl. Acad. Sci. 92: 5620-5624); wheat (Gautier et al (1998) Eur. J. Biochem. 252(2): 314-324); tobacco (Marty et al. (1991) Plant Mol. Biol. 17: 143-148); barley (PCT Patent Application 00/58352); rice (Ishiwatari et al. (1995) Planta 195: 456-463); soybean (Shi et al. (1996) Plant Mol. Biol. 32: 653-662); rapeseed (Bower et al. Plant Cell 8: 1641-1650) and calf (Terashima et al. (1999) DNA Seq. 10(3): 203-205); and the like. In yet other embodiments, exemplary nucleic acids for use herein include those encoding the thioredoxin and thioredoxin-like polypeptide chains set forth as SEQ ID NOs:38, 42, 46 and 50; and those encoding the thioredoxin and thioredoxin-like polypeptide chains set forth in Table 5 as SEQ ID NOs:52-194. The respective nucleic acid sequences encoding the amino acids set forth in SEQ ID NOs:52-194 can be readily identified via the Swiss Protein identifier (accession) numbers provided in Table 5 (in parenthesis).

[0171] As used herein, the term “thioredoxin-reductase” refers to a protein that complexes with a flavin, such as FAD. The flavin compound serves as an electron donor for the thioredoxin-reductase protein active site. Thioredoxin reductases have a redox active, disulfide bond site capable of reducing thioredoxin. The active site of thioredoxin-reductase contains 2 cysteines. The type of amino acids surrounding the 2 cysteine residues forming the active site can vary as hydrophobic, non-polar or polar. An exemplary thioredoxin-reductase is NADPH-thioredoxin-reductase (TR), which is a cytosolic homodimeric enzyme comprising typically 300-500 amino acids. Crystal structures of both E. coli and plant thioredoxin-reductase have been obtained (Waksman et al. (1994) J. Mol. Biol. 236: 800-816; Dai et al. (1996) J. Mol. Biol. 264:1044-1057). NADPH-thioredoxin-reductases have been expressed in heterologous hosts, for example the Arabidopsis NADPH-thioredoxin-reductase has been expressed in E. coli (Jacquot et al. (1 994) J. Mol. Biol. 235: 1357-1363) and wheat (PCT Patent Application 00/58453).

[0172] Exemplary nucleic acid sequences encoding thioredoxin-reductase proteins can readily be obtained from a variety of sources, such as from the sequence set forth in Table 5 and the Sequence Listing provide herein, from Arabidopsis (Riveira Madrid et al. (1995) Proc. Natl. Acad. Sci. USA 92: 5620-5624), E. coli (Russel et al. (1988) J. Biol. Chem. 263: 9015-9019); barley (PCT Patent Application 00/58352 and wheat (Gautier et al., (1998) Eur. J. Biochem. 252: 314-324); and the like. In yet other embodiments, exemplary nucleic acids for use herein include those encoding the thioredoxin-reductase polypeptide chains set forth as SEQ ID NOs:8, 9, 10, 40, 44, 48 and 50; and those encoding the thioredoxin-reductase polypeptide chains set forth in Table 5 as SEQ ID NOs:195-313. The respective nucleic acid sequences encoding the amino acids set forth in SEQ ID NOs:195-313 can be readily identified via the Swiss Protein identifier (accession) numbers provided in Table 5 (in parenthesis).

[0173] Also contemplated for use in the methods and compositions provided herein are nucleic acid and amino acid homologs that are “subtantially homologous” to the thioredoxin and thioredoxin-reductase nucleic and amino acids set forth herein, which includes thioredoxin and thioredoxin-reductase polypeptides encoded by a sequence of nucleotides that hybridizes under conditions of low, moderate or high stringency to the sequence of nucleotides encoding the thioredoxin and thioredoxin-reductase nucleic and amino acids set forth herein (e.g., in the Examples, Sequence Listing and/or Table 5). As used herein, a DNA or nucleic acid homolog refers to a nucleic acid that includes a preselected conserved nucleotide sequence, such as a sequence encoding a therapeutic polypeptide. By the term “substantially homologous” is meant having at least 80%, preferably at least 90%, most preferably at least 95% homology therewith or a less percentage of homology or identity and conserved biological activity or function.

[0174] The terms “homology” and “identity” are often used interchangeably. In this regard, percent homology or identity may be determined, for example, by comparing sequence information using a GAP computer program. The GAP program utilizes the alignment method of Needleman and Wunsch (J. Mol. Biol. 48:443 (1970), as revised by Smith and Waterman (Adv. Appl. Math. 2:482 (1981). Briefly, the GAP program defines similarity as the number of aligned symbols (i.e., nucleotides or amino acids) which are similar, divided by the total number of symbols in the shorter of the two sequences. The preferred default parameters for the GAP program may include: (1) a unary comparison matrix (containing a value of 1 for identities and 0 for non-identities) and the weighted comparison matrix of Gribskov and Burgess, Nucl. Acids Res. 14:6745 (1986), as described by Schwartz and Dayhoff, eds., ATLAS OF PROTEIN SEQUENCE AND STRUCTURE, National Biomedical Research Foundation, pp. 353-358 (1979); (2) a penalty of 3.0 for each gap and an additional 0.10 penalty for each symbol in each gap; and (3) no penalty for end gaps.

[0175] By sequence identity, the number of conserved amino acids are determined by standard alignment algorithms programs, and are used with default gap penalties established by each supplier. Substantially homologous nucleic acid molecules would hybridize typically at moderate stringency or at high stringency all along the length of the nucleic acid of interest. Preferably the two molecules will hybridize under conditions of high stringency. Also contemplated are nucleic acid molecules that contain degenerate codons in place of codons in the hybridizing nucleic acid molecule.

[0176] Whether any two nucleic acid molecules have nucleotide sequences that are at least 80%, 85%, 90%, 95%, 96%, 97%, 98% or 99% “identical” can be determined using known computer algorithms such as the “FAST A” program, using for example, the default parameters as in Pearson and Lipman, Proc. Natl. Acad. Sci. USA 85:2444 (1988). Alternatively the BLAST function of the National Center for Biotechnology Information database may be used to determine relative sequence identity.

[0177] In general, sequences are aligned so that the highest order match is obtained. “Identity” per se has an art-recognized meaning and can be calculated using published techniques. (See, e.g.: Computational Molecular Biology, Lesk, A. M., ed., Oxford University Press, New York, 1988; Biocomputing: Informatics and Genome Projects, Smith, D. W., ed., Academic Press, New York, 1993; Computer Analysis of Sequence Data, Part I, Griffin, A. M., and Griffin, H. G., eds., Humana Press, New Jersey, 1994; Sequence Analysis in Molecular Biology, von Heinje, G., Academic Press, 1987; and Sequence Analysis Primer, Gribskov, M. and Devereux, J., eds., M Stockton Press, New York, 1991). While there exist a number of methods to measure identity between two polynucleotide or polypeptide sequences, the term “identity” is well known to skilled artisans (Carillo, H. & Lipton, D., SIAM J Applied Math 48:1073 (1988)). Methods commonly employed to determine identity or similarity between two sequences include, but are not limited to, those disclosed in Guide to Huge Computers, Martin J. Bishop, ed., Academic Press, San Diego, 1994, and Carillo, H. & Lipton, D., SIAM J Applied Math 48:1073 (1988). Methods to determine identity and similarity are codified in computer programs. Preferred computer program methods to determine identity and similarity between two sequences include, but are not limited to, GCG program package (Devereux, J., et al., Nucleic Acids Research 12(I):387 (1984)), BLASTP, BLASTN, FASTA (Atschul, S. F., et al., J Molec Biol 215:403 (1990)).

[0178] Therefore, as used herein, the term “identity” represents a comparison between a test and a reference polypeptide or polynucleotide. For example, a test polypeptide may be defined as any polypeptide that is 90% or more identical to a reference polypeptide.

[0179] As used herein, the term at least “90% identical to” refers to percent identities from 90 to 99.99 relative to the reference polypeptides. Identity at a level of 90% or more is indicative of the fact that, assuming for exemplification purposes a test and reference polynucleotide length of 100 amino acids are compared. No more than 10% (i.e., 10 out of 100) amino acids in the test polypeptide differs from that of the reference polypeptides. Similar comparisons may be made between a test and reference polynucleotides. Such differences may be represented as point mutations randomly distributed over the entire length of an amino acid sequence or they may be clustered in one or more locations of varying length up to the maximum allowable, e.g. 10/100 amino acid difference (approximately 90% identity). Differences are defined as nucleic acid or amino acid substitutions, or deletions.

[0180] As used herein: stringency of hybridization in determining percentage mismatch is as follows:

[0181] 1) high stringency: 0.1×SSPE, 0.1% SDS, 65° C.

[0182] 2) medium stringency: 0.2×SSPE, 0.1% SDS, 50° C.

[0183] 3) low stringency: 1.0×SSPE, 0.1% SDS, 50° C.

[0184] Those of skill in this art know that the washing step selects for stable hybrids and also know the ingredients of SSPE (see, e.g., Sambrook, E. F. Fritsch, T. Maniatis, in: Molecular Cloning, A Laboratory Manual, Cold Spring Harbor Laboratory Press (1989), vol. 3, p. B.13, see, also, numerous catalogs that describe commonly used laboratory solutions). SSPE is pH 7.4 phophate-buffered 0.18 NaCl. Further, those of skill in the art recognize that the stability of hybrids is determined by Tₘ, which is a function of the sodium ion concentration and temperature (Tₘ=81.5° C.−16.6(log₁₀[Na⁺])+0.41(%G+C)−600/I)), so that the only parameters in the wash conditions critical to hybrid stability are sodium ion concentration in the SSPE (or SSC) and temperature.

[0185] It is understood that equivalent stringencies may be achieved using alternative buffers, salts and temperatures. By way of example and not limitation, procedures using conditions of low stringency are as follows (see also Shilo and Weinberg, Proc. Natl. Acad. Sci. USA, 78:6789-6792 (1981)): Filters containing DNA are pretreated for 6 hours at 40° C. in a solution containing 35% formamide, 5×SSC, 50 mM Tris-HCl (pH 7.5), 5 mM EDTA, 0.1% PVP, 0.1% Ficoll, 1% BSA, and 500 μg/ml denatured salmon sperm DNA (10×SSC is 1.5 M sodium chloride, and 0.15 M sodium citrate, adjusted to a pH of 7).

[0186] In a particular embodiment, a heteromultimeric-protein-complex is produced as a fusion polypeptide between the first and second redox protein, wherein the first redox protein is thioredoxin and the second redox protein is a thioredoxin-reductase. In one embodiment, the second recombinant polypeptide, e.g., the thioredoxin-reductase is positioned N-terminal relative to the first recombinant polypeptide, e.g., the thioredoxin. Accordingly, any protein which is classified as thioredoxin, such as the thioredoxin component of the NADPH thioredoxin system and the thioredoxin present in the ferredoxin/thioredoxin system also known as TRx and TRm may be used in combination with any thioredoxin-reductase such as the NADPH thioredoxin-reductase and the ferredoxin-thioredoxin-reductase and any other proteins having the capability of reducing thioredoxin. In particular embodiments the thioredoxin and thioredoxin-reductase are plant derived.

[0187] In an alternate embodiment, the naturally occurring nucleic acid sequence encoding the thioredoxin/thioredoxin-reductase protein fusion obtainable from Mycobacterium leprae (Wieles et al. (1995) J. Biol. Chem. 27:25604-25606) is used, as set forth in the Examples herein.

[0188] Immunoglobulins

[0189] In another embodiment of the present invention, the multimeric-protein-complexes are immunoglobulins. As used herein “immunoglobulin-polypeptide-chain” refers to a first polypeptide that is capable of associating with a second polypeptide to form an immunologically active (i.e. capable of antigen binding) multimeric-protein-complex. The types of immunoglobulins and immunoglobulin-polypeptide-chains contemplated for use herein include the immunologically active (i.e. antigen binding) portions of a light and heavy chain. Exemplary immunoglobulins and immunoglobulin-polypeptide-chains for use herein include substantially intact immunoglobulins, including any IgG, IgA, IgD, IgE and IgM, as well as any portion of an immunoglobulin, including those portions well-known as Fab fragments, Fab′ fragments, F(ab′).sub2. fragments and Fv fragments.

[0190] In this embodiment, the first recombinant polypeptide may be any immunoglobulin heavy chain, including any IgG, IgA, IgD, IgE or IgM heavy chain, and the second recombinant polypeptide may be a kappa or lambda immunoglobulin light chain. Accordingly, provided herein are methods of producing an immunoglobulin, said method comprising: (a) producing in a cell comprising oil bodies, a first immunoglobulin-polypeptide-chain and a second immunoglobulin-polypeptide-chain wherein said first immunoglobulin-polypeptide-chain is capable of associating with said second immunoglobulin-polypeptide-chain to form said immunoglobulin; and (b) associating said immunoglobulin with an oil body through an oil-body-targeting-protein capable of associating with said oil bodies and said first immunoglobulin-polypeptide-chain.

[0191] As set forth herein, the multimeric immunoglobulin is associated with an oil body through an oil-body-targeting-protein. In particular embodiments, the oil-body-targeting-protein may be a fusion polypeptide comprising an oil-body-protein and an immunoglobulin binding protein, such as for example protein A, protein L, and protein G.

[0192] In yet another embodiment involving immunoglobulins, the first and second recombinant polypeptides (immunoglobulins) are separately fused to an oil body protein, for example an oleosin or caleosin. For example,

[0193] a) the first recombinant polypeptide may be an immunoglobulin heavy chain, including any IgG, IgA, IgD, IgE or IgM heavy chain, and the second recombinant polypeptide may be a kappa or lambda immunoglobulin light chain; or

[0194] b) the first recombinant polypeptide may be the variable and first constant domain from an immunoglobulin heavy chain and the second recombinant polypeptide may be a kappa or lambda immunoglobulin light chain; or

[0195] c) the first recombinant polypeptide may be the variable domain from an immunoglobulin heavy chain and the second recombinant polypeptide may be the variable domain from a kappa or lambda immunoglobulin light chain.

[0196] In certain embodiments, the fusion polypeptides are designed or selected to allow the heteromultimeric-protein-complex formation between immunoglobulin light and heavy chain sequences on the oil bodies within the cell comprising oil bodies.

[0197] Preparation of Expression Vectors Comprising Oil-Body-Targeting-Proteins and the First and/or Second Recombinant Polypeptides, Multimeric-Protein-Complexes, Heteromultimeric-Protein-Complexes, Multimeric-Fusion-Proteins, Heteromultimeric-Fusion-Proteins, Immunoglobulins, Immunoglobulin-Polypeptide-Chains, Redox-Fusion-Polypeptides, or the First and/or Second Thioredoxin-Related Proteins.

[0198] In accordance with the present invention, the first and/or second recombinant polypeptides, multimeric-protein-complexes, heteromultimeric-protein-complexes, multimeric-fusion-proteins, heteromultimeric-fusion-proteins, immunoglobulins, immunoglobulin-polypeptide-chains, redox-fusion-polypeptides, or the first and/or second thioredoxin-related proteins; and the oil-body-targeting-protein are conveniently produced in a cell. In order to produce the recombinant polypeptides or multimeric-protein-complexes, a nucleic acid sequence encoding either the the first and/or second recombinant polypeptides, multimeric-protein-complexes, heteromultimeric-protein-complexes, multimeric-fusion-proteins, heteromultimeric-fusion-proteins, immunoglobulins, immunoglobulin-polypeptide-chains, redox-fusion-polypeptides, or the first and/or second thioredoxin-related proteins; and/or the oil-body-targeting-protein are incorporated in a recombinant expression vector. Accordingly, provided herein are recombinant expression vectors comprising the chimeric nucleic acids provided herein suitable for expression of the oil-body-targeting-protein and the first and/or second recombinant polypeptides, multimeric-protein-complexes, heteromultimeric-protein-complexes, multimeric-fusion-proteins, heteromultimeric-fusion-proteins, immunoglobulins, immunoglobulin-polypeptide-chains, redox-fusion-polypeptides, or the first and/or second thioredoxin-related proteins, suitable for the selected cell. The term “suitable for expression in the selected cell” means that the recombinant expression vector contains all nucleic acid sequences required to ensure expression in the selected cell.

[0199] Accordingly, the recombinant expression vectors further contain regulatory nucleic acid sequences selected on the basis of the cell which is used for expression and ensuring initiation and termination of transcription operatively linked to the nucleic acid sequence encoding the recombinant polypeptide or multimeric-protein-complex and/or the oil-body-targeting-protein. Regulatory nucleic acid sequences include promoters, enhancers, silencing elements, ribosome binding sites, Shine-Dalgarno sequences, introns and other expression elements. “Operatively linked” is intended to mean that the nucleic acid sequences comprising the regulatory regions linked to the nucleic acid sequences encoding the recombinant polypeptide or multimeric-protein-complex and/or the oil-body-targeting-protein allow expression in the cell. A typical nucleic acid construct comprises in the 5′ to 3′ direction a promoter region capable of directing expression, a coding region comprising the first and/or second recombinant polypeptides, multimeric-protein-complexes, heteromultimeric-protein-complexes, multimeric-fusion-proteins, heteromultimeric-fusion-proteins, immunoglobulins, immunoglobulin-polypeptide-chains, redox-fusion-polypeptides, or the first and/or second thioredoxin-related proteins; and/or an oil-body-targeting-protein and a termination region functional in the selected cell.

[0200] The selection of regulatory sequences will depend on the organism and the cell type in which the first and/or second recombinant polypeptides, multimeric-protein-complexes, heteromultimeric-protein-complexes, multimeric-fusion-proteins, heteromultimeric-fusion-proteins, immunoglobulins, immunoglobulin-polypeptide-chains, redox-fusion-polypeptides, or the first and/or second thioredoxin-related proteins; and/or the oil-body-targeting-protein is expressed, and may influence the expression levels of the polypeptide. Regulatory sequences are art-recognized and selected to direct expression of the oil-body-targeting-protein and the recombinant polypeptides or multimeric-protein-complexes in the cell.

[0201] Promoters that may be used in bacterial cells include the lac promoter (Blackman et al. (1978) Cell: 13: 65-71), the trp promoter (Masuda et al. (1996) Protein Eng: 9: 101-106) and the T7 promoters (Studier et al. (1986) J. Mol. Biol. 189: 113-130). Promoters functional in plant cells that may be used herein include constitutive promoters such as the 35S CaMV promoter (Rothstein et al. (1987) Gene: 53: 153-161) the actin promoter (McElroy et al. (1990) Plant Cell 2: 163-171) and the ubiquitin promoter (European Patent Application 0 342 926). Other promoters are specific to certain tissues or organs (for example, roots, leaves, flowers or seeds) or cell types (for example, leaf epidermal cells, mesophyll cells or root cortex cells) and or to certain stages of plant development. Timing of expression may be controlled by selecting an inducible promoter, for example the PR-a promoter described in U.S. Pat. No. 5,614,395. Selection of the promoter therefore depends on the desired location and timing of the accumulation of the desired polypeptide. In a particular embodiment, the first and/or second recombinant polypeptides, multimeric-protein-complexes, heteromultimeric-protein-complexes, multimeric-fusion-proteins, heteromultimeric-fusion-proteins, immunoglobulins, immunoglobulin-polypeptide-chains, redox-fusion-polypeptides, or the first and/or second thioredoxin-related proteins; and the oil-body-targeting-protein are expressed in a seed cell and seed specific promoters are utilized. Seed specific promoters that may be used herein include for example the phaseolin promoter (Sengupta-Gopalan et al. (1985) Proc. Natl. Acad. Sci. USA: 82: 3320-3324), and the Arabidopsis 18 kDa oleosin promoter (van Rooijen et al. (1992) Plant. Mol. Biol. 18: 1177-1179). New promoters useful in various plant cell types are constantly discovered. Numerous examples of plant promoters may be found in Ohamuro et al. (Biochem of Pl. (1989) 15: 1-82).

[0202] Genetic elements capable of enhancing expression of the polypeptide may be included in the expression vectors. In plant cells these include for example, the untranslated leader sequences from viruses such as the AMV leader sequence (Jobling and Gehrke (1987) Nature: 325: 622-625) and the intron associated with the maize ubiquitin promoter (See: U.S. Pat. No. 5,504,200).

[0203] Transcriptional terminators are generally art recognized and besides serving as a signal for transcription termination serve as a protective element serving to extend the mRNA half-life (Guarneros et al. (1982) Proc. Natl. Acad. Sci. USA: 79: 238-242). In nucleic acid sequences for the expression in plant cells, the transcriptional terminator typically is from about 200 nucleotide to about 1000 nucleotides in length. Terminator sequences that may be used herein include for example, the nopaline synthase termination region (Bevan et al. (1983) Nucl. Acid. Res.: 11: 369-385), the phaseolin terminator (van der Geest et al. (1994) Plant J.: 6: 413-423), the terminator for the octopine synthase gene of Agrobacterium tumefaciens or other similarly functioning elements. Transcriptional terminators can be obtained as described by An (1987) Methods in Enzym. 153: 292). The selection of the transcriptional terminator may have an effect on the rate of transcription.

[0204] Accordingly, provided herein are chimeric nucleic acid sequences encoding a first and/or second recombinant polypeptides, multimeric-protein-complexes, heteromultimeric-protein-complexes, multimeric-fusion-proteins, heteromultimeric-fusion-proteins, immunoglobulins, immunoglobulin-polypeptide-chains, redox-fusion-polypeptides, and/or thioredoxin-related proteins. In one embodiment, said nucleic acid comprises:

[0205] (a) a first nucleic acid sequence encoding an oil-body-targeting-protein operatively linked in reading frame to;

[0206] (b) a second nucleic acid sequence encoding a first recombinant polypeptide, immunoglobulin-polypeptide-chain, or redox protein; linked in reading frame to;

[0207] (c) a third nucleic acid sequence encoding a second recombinant polypeptide, immunoglobulin-polypeptide-chain or redox protein, wherein said first and second recombinant polypeptides, immunoglobulin-polypeptide-chains or redox proteins are capable of forming a multimeric-protein-complex.

[0208] In another embodiment, provided herein is an expression vector comprising:

[0209] 1) a first nucleic acid sequence capable of regulating transcription in said cell operatively linked to;

[0210] 2) a second nucleic acid sequence encoding a recombinant fusion polypeptide comprising (i) a nucleic acid sequence encoding a sufficient portion of an oil-body-protein to provide targeting of said recombinant fusion polypeptide to an oil body linked in reading frame to (ii) a nucleic acid sequence encoding a multimeric-fusion-protein, such as a redox fusion polypeptide or immunoglobulin, comprising a first recombinant polypeptide, such as a redox protein or immunoglobulin-polypeptide-chain, linked to a second recombinant polypeptide, such as a second redox protein or a second immunoglobulin-polypeptide-chain, operatively linked to;

[0211] 3) a third nucleic acid sequence capable of terminating transcription in said cell.

[0212] The recombinant expression vector further may contain a marker gene. Marker genes that may be used in accordance with the present invention include all genes that allow the distinction of transformed cells from non-transformed cells including all selectable and screenable marker genes. A marker may be a resistance marker such as an antibiotic resistance marker against for example kanamycin, ampicillin, G418, bleomycin hygromycin, chloramphenicol which allows selection of a trait by chemical means or a tolerance marker against for example a chemical agent such as the normally phytotoxic sugar mannose (Negrotto et al. (2000) Plant Cell Rep. 19: 798-803). In plant recombinant expression vectors herbicide resistance markers may conveniently be used for example markers conferring resistance against glyphosate (U.S. Pat. Nos. 4,940,935 and 5,188,642) or phosphinothricin (White et al. (1990) Nucl. Acids Res. 18: 1062; Spencer et al. (1990) Theor. Appl. Genet. 79: 625-631). Resistance markers to a herbicide when linked in close proximity to the redox protein or oil-body-targeting-protein may be used to maintain selection pressure on a population of plant cells or plants for those plants that have not lost the protein of interest. Screenable markers that may be employed to identify transformants through visual observation include beta-glucuronidase (GUS) (see U.S. patents U.S. Pat. No. 5,268,463 and U.S. Pat. No. 5,599,670) and green fluorescent protein (GFP) (Niedz et al. (1995) Plant Cell Rep.: 14: 403).

[0213] The recombinant expression vectors further may contain nucleic acid sequences encoding targeting signals ensuring targeting to a cell compartment or organelle. Suitable targeting signals that may be used herein include those that are capable of targeting polypeptides to the endomembrane system. Exemplary targeting signals that may be used herein include targeting signals capable of directing the protein to the periplasm, the cytoplasm, the golgi apparatus, the apoplast (Sijmons et al., 1990, Bio/Technology, 8:217-221) the chloroplast (Comai et al. (1988) J. Biol. Chem. 263: 15104-15109), the mitochondrion, the peroxisome (Unger et al. (1989) Plant Mol. Biol. 13: 411-418), the ER, the vacuole (Shinshi et al. (1990) Plant Mol. Biol. 14: 357-368 and the oil body. By the inclusion of the appropriate targeting sequences it is possible to direct the oil-body-targeting-protein or the first and/or second recombinant polypeptides, multimeric-protein-complexes, heteromultimeric-protein-complexes, multimeric-fusion-proteins, heteromultimeric-fusion-proteins, immunoglobulins, immunoglobulin-polypeptide-chains, redox-fusion-polypeptides, and/or thioredoxin-related proteins, to the desired organelle or cell compartment.

[0214] The recombinant expression vectors of the present invention may be prepared in accordance with methodologies well known to those of skill in the art of molecular biology (see for example: Sambrook et al. (1990) Molecular Cloning, 2^{nd} ed. Cold Spring Harbor Press). The preparation of these constructs may involve techniques such as restriction digestion, ligation, gel electrophoresis, DNA sequencing and PCR. A wide variety of cloning vectors is available to perform the necessary cloning steps resulting in a recombinant expression vector ensuring expression of the polypeptide. Especially suitable for this purpose are vectors with a replication system that is functional in Escherichia coli such as pBR322, the PUC series of vectors, the M13mp series of vectors, pBluescript etc. Typically these vectors contain a marker allowing the selection of transformed cells for example by conferring antibiotic resistance. Nucleic acid sequences may be introduced in these vectors and the vectors may be introduced in E. coli grown in an appropriate medium. Vectors may be recovered from cells upon harvesting and lysing the cells.

[0215] Recombinant expression vectors suitable for the introduction of nucleic acid sequences in plant cells include Agrobacterium and Rhizobium based vectors such as the Ti and Ri plasmids. Agrobacterium based vectors typically carry at least one T-DNA border sequence and include vectors such pBIN 19 (Bevan (1984) Nucl Acids Res. Vol. 12, 22:8711-8721) and other binary vector systems (for example: U.S. Pat. No. 4,940,838).

[0216] Production of Cells Comprising a First and/or Second Recombinant Polypeptides, Multimeric-Protein-Complexes, Heteromultimeric-Protein-Complexes, Multimeric-Fusion-Proteins, Heteromultimeric-Fusion-Proteins, Immunoglobulins, Immunoglobulin-Polypeptide-Chains, Redox-Fusion-Polypeptides, and/or a First and/or Second Thioredoxin-Related Protein and Oil-Body-Targeting-Proteins

[0217] In accordance with the present invention, the recombinant expression vectors are introduced into the cell that is selected and the selected cells are grown to produce the first and/or second recombinant polypeptides, multimeric-protein-complexes, heteromultimeric-protein-complexes, multimeric-fusion-proteins, heteromultimeric-fusion-proteins, immunoglobulins, immunoglobulin-polypeptide-chains, redox-fusion-polypeptides, a first and/or second thioredoxin-related protein; and the oil-body-targeting-protein either directly or in a progeny cell.

[0218] Methodologies to introduce recombinant expression vectors into a cell also referred to herein as “transformation” are well known to the art and vary depending on the cell type that is selected. General techniques to transfer the recombinant expression vectors into the cell include electroporation; chemically mediated techniques, for example CaCl2 mediated nucleic acid uptake; particle bombardment (biolistics); the use of naturally infective nucleic acid sequences for example virally derived nucleic acid sequences or when plant cells are used Agrobacterium or Rhizobium derived nucleic acid sequences; PEG mediated nucleic acid uptake, microinjection, and the use of silicone carbide whiskers (Kaeppler et al. (1990) Plant Cell Rep. 9:415-418) all of which may be used herein.

[0219] Introduction of the recombinant expression vector into the cell may result in integration of its whole or partial uptake into host cell genome including the chromosomal DNA or the plastid genome. Alternatively the recombinant expression vector may not be integrated into the genome and replicate independently of the host cell's genomic DNA. Genomic integration of the nucleic acid sequence is typically used as it will allow for stable inheritance of the introduced nucleic acid sequences by subsequent generations of cells and the creation of cell, plant or animal lines.

[0220] Particular embodiments involve the use of plant cells. Particular plant cells used herein include cells obtainable from Brazil nut (Betholletia excelsa); castor (Riccinus communis); coconut (Cocus nucifera); coriander (Coriandrum sativum); cotton (Gossypium spp.); groundnut (Arachis hypogaea); jojoba (Simmondsia chinensis); linseed/flax (Linum usitatissimum); maize (Zea mays); mustard (Brassica spp. and Sinapis alba); oil palm (Elaeis guineeis); olive (Olea europaea); rapeseed (Brassica spp.); safflower (Carthamus tinctorius); soybean (Glycine max); squash (Cucurbita maxima); barley (Hordeum vulgare); wheat (Traeticum aestivum) and sunflower (Helianthus annuus).

[0221] Transformation methodologies for dicotelydenous plant species are well known. Generally Agrobacterium mediated transformation is utilized because of its high efficiency as well as the general susceptibility by many, if not all dicotelydenous plant species. Agrobacterium transformation generally involves the transfer of a binary vector (e.g. pBIN 19) comprising the DNA of interest to an appropriate Agrobacterium strain (e.g. CIB542) by for example tri-parental mating with an E. coli strain carrying the recombinant binary vector and an E. coli strain carrying a helper plasmid capable of mobilization of the binary vector to the target Agrobacterium strain, or by DNA transformation of the Agrobacterium strain (Hofgen et al. Nucl. Acids. Res. (1988) 16: 9877. Other transformation methodologies that may be used to transform dicotelydenous plant species include biolistics (Sanford (1988) Trends in Biotechn. 6: 299-302); electroporation (Fromm et al. (1985) Proc. Natl. Acad. Sci. USA 82: 5824-5828); PEG mediated DNA uptake (Potrykus et al. (1985) Mol. Gen. Genetics 199: 169-177); microinjection (Reich et al. Bio/Techn. (1986) 4: 1001-1004) and silicone carbide whiskers (Kaeppler et al. (1990) Plant Cell Rep. 9: 415-418). The exact transformation methodologies typically vary somewhat depending on the plant species that is used.

[0222] In a particular embodiment the oil bodies are obtained from safflower and the recombinant proteins are expressed in safflower. Safflower transformation has been described by Baker and Dyer (Plant Cell Rep. (1996) 16: 106-110).

[0223] Monocotelydenous plant species may now also be transformed using a variety of methodologies including particle bombardment (Christou et al. (1991) Biotechn. 9: 957-962; Weeks et al. Plant Physiol. (1993) 102: 1077-1084; Gordon-Kamm et al. Plant Cell (1990) 2: 603-618) PEG mediated DNA uptake (EP 0 292 435; 0 392 225) or Agrobacterium-mediated transformation (Goto-Fumiyuki et al (1999) Nature-Biotech. 17 (3):282-286).

[0224] Plastid transformation is decribed in U.S. Pat. Nos. 5,451,513; 5,545,817 and 5,545,818; and PCT Patent Applications 95/16783; 98/11235 and 00/39313) Basic chloroplast transformation involves the introduction of cloned plastid DNA flanking a selectable marker together with the nucleic acid sequence of interest into a suitable target tissue using for example biolistics or protoplast transformation. Selectable markers that may be used include for example the bacterial aadA gene (Svab et al. (1993) Proc. Natl. Acad. Sci. USA 90: 913-917). Plastid promoters that may be used include for example the tobacco clpP gene promoter (PCT Patent Application 97/06250).

[0225] In another embodiment, the invention chimeric nucleic acid contructs provided herein are directly transformed into the plastid genome. Plastid transformation technology is described extensively in U.S. Pat. Nos. 5,451,513, 5,545,817, 5,545,818 and 5,576,198; in PCT application nos. WO 95/16783 and WO 97/32977; and in McBride et. al., Proc Natl Acad Sci USA 91: 7301-7305 (1994), the entire disclosures of all of which are hereby incorporated by reference. In one embodiment, plastid transformation is achieved via biolistics; first carried out in the unicellular green alga Chlamydomonas reinhardtii (Boynton et al. (1988) Science 240:1534-1537)) and then extended to Nicotiana tabacum (Svab et al. (1990) Proc Natl Acad Sci USA 87:8526-8530), combined with selection for cis-acting antibiotic resistance loci (spectinomycin or streptomycin resistance) or complementation of non-photosynthetic mutant phenotypes.

[0226] In another embodiment, tobacco plastid transformation is carried out by particle bombardment of leaf or callus tissue, or polyethylene glycol (PEG)-mediated uptake of plasmid DNA by protoplasts, using cloned plastid DNA flanking a selectable antibiotic resistance marker. For example, 1 to 1.5 kb flanking regions, termed targeting sequences, facilitate homologous recombination with the plastid genome and allow the replacement or modification of specific regions of the 156 kb tobacco plastid genome. In one embodiment, point mutations in the plastid 16S rDNA and rps12 genes conferring resistance to spectinomycin and/or streptomycin can be utilized as selectable markers for transformation (Svab et al (1990) Proc Natl Acad Sci USA 87:8526-8530; Staub et al. (1992) Plant Cell 4:39-45, the entire disclosures of which are hereby incorporated by reference), resulting in stable homoplasmic transformants at a frequency of approximately one per 100 bombardments of target leaves. The presence of cloning sites between these markers allows creation of a plastid targeting vector for introduction of foreign genes (Staub et al. (1993) EMBO J 12:601-606, the entire disclosure of which is hereby incorporated by reference). In another embodiment, substantial increases in transformation frequency can be obtained by replacement of the recessive rRNA or r-protein antibiotic resistance genes with a dominant selectable marker, the bacterial aadA gene encoding the spectinomycin-detoxifying enzyme aminoglycoside-3′-adenyltransferase (Svab et al. (1993) Proc Natl Acad Sci USA 90: 913-917, the entire disclosure of which is hereby incorporated by reference). This marker has also been used successfully for high-frequency transformation of the plastid genome of the green alga Chlamydomonas reinhardtii (Goldschmidt-Clermont, M. (1991) Nucl Acids Res 19, 4083-4089, the entire disclosure of which is hereby incorporated by reference). In other embodiments, plastid transformation of protoplasts from tobacco and the moss Physcomitrella can be attained using PEG-mediated DNA uptake (O'Neill et al (1993) Plant J 3:729-738; Koop et al. (1996) Planta 199:193-201, the entire disclosures of which are hereby incorporated by reference).

[0227] Both particle bombardment and protoplast transformation are also contemplated for use herein. Plastid transformation of oilseed plants has been successfully carried out in the genera Arabidopsis and Brassica (Sikdar et al. (1998) Plant Cell Rep 18:20-24; PCT Application WO 00/39313, the entire disclosures of which are hereby incorporated by reference).

[0228] A chimeric nucleic sequence construct is inserted into a plastid expression cassette including a promoter capable of expressing the construct in plant plastids. A particular promoter capable of expression in a plant plastid is, for example, a promoter isolated from the 5′ flanking region upstream of the coding region of a plastid gene, which may come from the same or a different species, and the native product of which is typically found in a majority of plastid types including those present in non-green tissues. Gene expression in plastids differs from nuclear gene expression and is related to gene expression in prokaryotes (Stern et al. (1997) Trends in Plant Sci 2:308-315, the entire disclosure of which is hereby incorporated by reference).

[0229] Plastid promoters generally contain the −35 and −10 elements typical of prokaryotic promoters, and some plastid promoters called PEP (plastid-encoded RNA polymerase) promoters are recognized by an E. coli-like RNA polymerase mostly encoded in the plastid genome, while other plastid promoters called NEP promoters are recognized by a nuclear-encoded RNA polymerase. Both types of plastid promoters are suitable for use herein. Examples of plastid promoters include promoters of clpP genes such as the tobacco clpP gene promoter (WO 97/06250, the entire disclosure of which is hereby incorporated by reference) and the Arabidopsis cipP gene promoter (U.S. application Ser. No. 09/038,878, the entire disclosure of which is hereby incorporated by reference). Another promoter capable of driving expression of a chimeric nucleic acid construct in plant plastids comes from the regulatory region of the plastid 16S ribosomal RNA operon (Harris et al., (1994) Microbiol Rev 58:700-754; Shinozaki et al. (1986) EMBO J 5:2043-2049, the entire disclosures of both of which are hereby incorporated by reference). Other examples of promoters capable of driving expression of a nucleic acid construct in plant plastids include a psbA promoter or am rbcL promoter. A plastid expression cassette preferably further includes a plastid gene 3′ untranslated sequence (3′ UTR) operatively linked to a chimeric nucleic acid construct of the present invention. The role of untranslated sequences is preferably to direct the 3′ processing of the transcribed RNA rather than termination of transcription. An exemplary 3′ UTR is a plastid rps16 gene 3′ untranslated sequence, or the Arabidopsis plastid psbA gene 3′ untranslated sequence. In a further embodiment, a plastid expression cassette includes a poly-G tract instead of a 3′ untranslated sequence. A plastid expression cassette also preferably further includes a 5′ untranslated sequence (5′ UTR) functional in plant plastids, operatively linked to a chimeric nucleic acid construct provided herein.

[0230] A plastid expression cassette is contained in a plastid transformation vector, which preferably further includes flanking regions for integration into the plastid genome by homologous recombination. The plastid transformation vector may optionally include at least one plastid origin of replication. The present invention also encompasses a plant plastid transformed with such a plastid transformation vector, wherein the chimeric nucleic acid construct is expressible in the plant plastid. Also encompassed herein is a plant or plant cell, including the progeny thereof, including this plant plastid. In a particular embodiment, the plant or plant cell, including the progeny thereof, is homoplasmic for transgenic plastids.

[0231] Other promoters capable of driving expression of a chimeric nucleic acid construct in plant plastids include transactivator-regulated promoters, preferably heterologous with respect to the plant or to the subcellular organelle or component of the plant cell in which expression is effected. In these cases, the DNA molecule encoding the transactivator is inserted into an appropriate nuclear expression cassette which is transformed into the plant nuclear DNA. The transactivator is targeted to plastids using a plastid transit peptide. The transactivator and the transactivator-driven DNA molecule are brought together either by crossing a selected plastid-transformed line with and a transgenic line containing a DNA molecule encoding the transactivator supplemented with a plastid-targeting sequence and operably linked to a nuclear promoter, or by directly transforming a plastid transformation vector containing the desired DNA molecule into a transgenic line containing a chimeric nucleic acid construct encoding the transactivator supplemented with a plastid-targeting sequence operably linked to a nuclear promoter. If the nuclear promoter is an inducible promoter, in particular a chemically inducible embodiment, expression of the chimeric nucleic acid construct in the plastids of plants is activated by foliar application of a chemical inducer. Such an inducible transactivator-mediated plastid expression system is preferably tightly regulatable, with no detectable expression prior to induction and exceptionally high expression and accumulation of protein following induction.

[0232] A particular transactivator is, for example, viral RNA polymerase. Particular promoters of this type are promoters recognized by a single sub-unit RNA polymerase, such as the T7 gene 10 promoter, which is recognized by the bacteriophage T7 DNA-dependent RNA polymerase. The gene encoding the T7 polymerase is preferably transformed into the nuclear genome and the T7 polymerase is targeted to the plastids using a plastid transit peptide. Promoters suitable for nuclear expression of a gene, for example a gene encoding a viral RNA polymerase such as the T7 polymerase, are described above and elsewhere in this application. Expression of chimeric nucleic acid constructs in plastids can be constitutive or can be inducible, and such plastid expression can be also organ- or tissue-specific. Examples of various expression systems are extensively described in WO 98/11235, the entire disclosure of which is hereby incorporated by reference. Thus, in one aspect, the present invention utilizes coupled expression in the nuclear genome of a chloroplast-targeted phage T7 RNA polymerase under the control of the chemically inducible PR-1a promoter, for example of the PR-1 promoter of tobacco, operably linked with a chloroplast reporter transgene regulated by T7 gene 10 promoter/terminator sequences, for example as described in as in U.S. Pat. No. 5,614,395 the entire disclosure of which is hereby incorporated by reference. In another embodiment, when plastid transformants homoplasmic for the maternally inherited TR or NTR genes are pollinated by lines expressing the T7 polymerase in the nucleus, F1 plants are obtained that carry both transgene constructs but do not express them until synthesis of large amounts of enzymatically active protein in the plastids is triggered by foliar application of the PR-1a inducer compound benzo(1,2,3)thiadiazole-7-carbothioic acid S-methyl ester (BTH).

[0233] In a particular embodiment, two or more genes, for example TR and NTR genes, are transcribed from the plastid genome from a single promoter in an operon-like polycistronic gene. In one embodiment, the operon-like polycistronic gene includes an intervening DNA sequence between two genes in the operon-like polycistronic gene. In a particular embodiment, the intervening DNA sequence is not present in the plastid genome to avoid homologous recombination with plastid sequences. In another embodiment, the DNA sequence is derived from the 5′ untranslated (UTR) region of a non-eukaryotic gene, preferably from a viral 5′UTR, preferably from a 5′UTR derived from a bacterial phage, such as a T7, T3 or SP6 phage. In one embodiment, a portion of the DNA sequence may be modified to prevent the formation of RNA secondary structures in an RNA transcript of the operon-like polycistronic gene, for example between the DNA sequence and the RBS of the downstream gene. Such secondary structures may inhibit or repress the expression of the downstream gene, particularly the initiation of translation. Such RNA secondary structures are predicted by determining their melting temperatures using computer models and programs such a the “mfold” program version 3 (available from Zuker and Turner, Washington University School of Medicine, St-Louis, Mo.) and other methods known to one skilled in the art.

[0234] The presence of the intervening DNA sequence in the operon-like polycistronic gene increases the accessibility of the RBS of the downstream gene, thus resulting in higher rates of expression. Such strategy is applicable to any two or more genes to be transcribed from the plastid genome from a single promoter in an operon-like chimeric heteromultimeric gene.

[0235] Following transformation the cells are grown, typically in a selective medium allowing the identification of transformants. Cells may be harvested in accordance with methodologies known to the art. In order to associate the oil bodies with the first and/or second recombinant polypeptides, multimeric-protein-complexes, heteromultimeric-protein-complexes, multimeric-fusion-proteins, heteromultimeric-fusion-proteins, immunoglobulins, immunoglobulin-polypeptide-chains, redox-fusion-polypeptides, and a first and/or second thioredoxin-related protein, the integrity of cells may be disrupted using any physical, chemical or biological methodology capable of disrupting the cells' integrity. These methodologies are generally cell-type dependent and known to the skilled artisan. Where plants are employed they may be regenerated into mature plants using plant tissue culture techniques generally known to the skilled artisan. Seeds may be harvested from mature transformed plants and used to propagate the plant line. Plants may also be crossed and in this manner, contemplated herein is the breedig of cells lines and transgenic plants that vary in genetic background. It is also possible to cross a plant line comprising the first recombinant polypeptide with a plant line comprising the second recombinant polypeptide. Accordingly, also provided herein are methods of producing in a plant a recombinant multimeric-protein-complex, said method comprising:

[0236] (a) preparing a first plant comprising cells, said cells comprising oil bodies and a first recombinant polypeptide, such as a redox protein (e.g., a thioredoxin-related protein, and the like) or an immunoglobulin-polypeptide-chain, wherein said first recombinant polypeptide is capable of associating with said oil bodies through an oil-body-targeting-protein;

[0237] (b) preparing a second plant comprising cells, said cells comprising oil bodies and a second recombinant polypeptide, such as a second redox protein (e.g., a thioredoxin-related protein, and the like) or a second immunoglobulin-polypeptide-chain; and

[0238] (c) sexually crossing said first plant with said second plant to produce a progeny plant comprising cells, said cells comprising oil bodies, wherein said oil bodies are capable of associating with said first recombinant polypeptide, and said first recombinant recombinant polypeptide is capable of associating with said second recombinant polypeptide to form said recombinant multimeric-protein-complex.

[0239] The second recombinant polypeptide may also associate with the oil bodies. Accordingly, also provided herein are methods of producing in a plant a recombinant multimeric-protein-complex, said method comprising:

[0240] (a) preparing a first plant comprising cells, said cells comprising oil bodies and a first recombinant polypeptide, such as a redox (or thioredoxin-related) protein or immunoglobulin-polypeptide-chain, wherein said first recombinant polypeptide is capable of associating with said oil bodies through an oil-body-targeting-protein;

[0241] (b) preparing a second plant comprising cells, said cells comprising oil bodies and a second recombinant polypeptide, such as a second redox (thioredoxin-related) protein or a second immunoglobulin-polypeptide-chain, wherein said second recombinant polypeptide is capable of associating with said oil bodies through an oil body targeting protein; and

[0242] (c) sexually crossing said first plant with said second plant to produce a progeny plant comprising cells, said cells comprising oil bodies, wherein said oil bodies are capable of associating with said first recombinant polypeptide, and said first recombinant recombinant polypeptide is capable of associating with said second recombinant polypeptide to form said recombinant multimeric-protein-complex.

[0243] Isolation of Oil Bodies

[0244] The oil bodies provided herein may be obtained from any cell containing oil bodies, including any animal cell; plant cell; fungal cell; for example a yeast cell, algae cell; or bacterial cell. Any process suitable for the isolation oil bodies from cells may be used herein. Processes for the isolation of oil bodies from plant seed cells have been described in U.S. patents (U.S. Pat. Nos. 6,146,645 and 6,183,762) and the isolation of oil bodies from yeast cells has been described by Ting et al. (1997) J. Biol. Chem. 272: 3699-3706).

[0245] In certain embodiments, the oil bodies are obtained from a plant cell such as for example a pollen cell; a fruit cell; a spore cell; a nut cell; mesocarp cell; for example the mesocarp cells obtainable from olive (Olea europaea) or avocado (Persea americana); or a seed cell. In particular embodiments the oil bodies are obtained from a plant seed cell. The seeds can be obtained from a transgenic plant according to the present invention. In particular embodiments, a seed of a transgenic plant according to the present invention contains the first and/or second recombinant polypeptides, multimeric-protein-complexes, heteromultimeric-protein-complexes, multimeric-fusion-proteins, heteromultimeric-fusion-proteins, immunoglobulins, immunoglobulin-polypeptide-chains, redox-fusion-polypeptides, or first and/or second thioredoxin-related proteins in a concentration of at least about 0.5% of total cellular seed protein. In further embodiments, a seed of a transgenic plant provided herein contains a recombinant polypeptide or multimeric-protein-complex in a concentration of at least about 0.5%, 0.6%, 0.7%, 0.8%, 0.9%, 1.0%, 1.25%, 1.5%, 1.75%, 2.0%, 2.25%, 2.5%, 3%, 4%, 5%, 6%, 7%, 8%, 9%, 10% or more, of total cellular seed protein. The upper limits of the recombinant polypeptide or multimeric-protein-complex concentration can be up to about 8%, 9%, 10%, 11%, 12%, 13%, 14%, 15%. Thus, the ranges at least about 0.5% up to about 15%; at least about 1.0% up to about 10%; and at least about 5% up to about 8% are amoung the various ranges contemplated herein.

[0246] Among the plant seeds useful in this regard are plant seeds obtainable from the group of plant species consisting of Brazil nut (Betholletia excelsa); castor (Riccinus communis); coconut (Cocus nucifera); coriander (Coriandrum sativum); cotton (Gossypium spp.); groundnut (Arachis hypogaea); jojoba (Simmondsia chinensis); linseed/flax (Linum usitatissimum); maize (Zea mays); mustard (Brassica spp. and Sinapis alba); oil palm (Elaeis guineeis); olive (Olea europaea); rapeseed (Brassica spp.); safflower (Carthamus tinctorius); soybean (Glycine max); squash (Cucurbita maxima); sunflower (Helianthus annuus); barley (Hordeum vulgare); wheat (Traeticum aestivum) and mixtures thereof. In a particular embodiment, oil bodies are obtainable from the seeds obtainable from safflower (Carthamus tinctorius).

[0247] In order to prepare oil bodies from plant seeds, plants are grown and allowed to set seed in accordance with common agricultural practices. Thus, the present invention also provides seeds comprising oil bodies, wherein said oil bodies further comprise invention multimeric-protein-complexes described herein. Upon harvesting the seed and, if necessary the removal of large insoluble materials such as stones or seed hulls, by for example sieving or rinsing, any process suitable for the isolation of oil bodies from seeds may be used herein. A typical process involves grinding of the seeds followed by an aqueous extraction process.

[0248] Seed grinding may be accomplished by any comminuting process resulting in a substantial disruption of the seed cell membrane and cell walls without compromising the structural integrity of the oil bodies present in the seed cell. Suitable grinding processes in this regard include mechanical pressing and milling of the seed. Wet milling processes such as decribed for cotton (Lawhon et al. (1977) J. Am. Oil Chem. Soc. 63: 533-534) and soybean (U.S. Pat. No. 3,971,856; Carter et al. (1974) J. Am. Oil Chem. Soc. 51: 137-141) are particularly useful in this regard. Suitable milling equipment capable of industrial scale seed milling include colloid mills, disc mills, pin mills, orbital mills, IKA mills and industrial scale homogenizers. The selection of the milling equipment will depend on the seed, which is selected, as well as the throughput requirement.

[0249] Solid contaminants such as seed hulls, fibrous materials, undissolved carbohydrates, proteins and other insoluble contaminants are subsequently preferably removed from the ground seed fraction using size exclusion based methodologies such as filtering or gravitational based methods such as a centrifugation based separation process. Centrifugation may be accomplished using for example a decantation centrifuge such as a HASCO 200 2-phase decantation centrifuge or an NX310B (Alpha Laval). Operating conditions are selected such that a substantial portion of the insoluble contaminants and sediments and may be separated from the soluble fraction.

[0250] Following the removal of insolubles the oil body fraction may be separated from the aqueous fraction. Gravitational based methods as well as size exclusion based technologies may be used. Gravitational based methods that may be used include centrifugation using for example a tubular bowl centrifuge such as a Sharples AS-16 or AS-46 (Alpha Laval), a disc stack centrifuge or a hydrocyclone, or separation of the phases under natural gravitation. Size exclusion methodologies that may be used include membrane ultra filtration and crossflow microfiltration.

[0251] Separation of solids and separation of the oil body phase from the aqueous phase may also be carried out concomitantly using gravity based separation methods or size exclusion based methods.

[0252] The oil body preparations obtained at this stage in the process are generally relatively crude and depending on the application of the oil bodies, it may be desirable to remove additional contaminants. Any process capable of removing additional seed contaminants may be used in this regard. Conveniently the removal of these contaminants from the oil body preparation may be accomplished by resuspending the oil body preparation in an aqueous phase and re-centrifuging the resuspended fraction, a process referred to herein as “washing the oil bodies”. The washing conditions selected may vary depending on the desired purity of the oil body fractions. For example where oil bodies are used in pharmaceutical compositions, generally a higher degree of purity may be desirable than when the oil bodies are used in food preparations. The oil bodies may be washed one or more times depending on the desired purity and the ionic strength, pH and temperature may all be varied. Analytical techniques may be used to monitor the removal of contaminants. For example SDS gel electrophoresis may be employed to monitor the removal of seed proteins.

[0253] The entire oil body isolation process may be performed in a batch wise fashion or continuous flow. In a particular embodiment, industrial scale continuous flow processes are utilized.

[0254] Through the application of these and similar techniques the skilled artisan is able to obtain oil bodies from any cell comprising oil bodies. The skilled artisan will recognize that generally the process will vary somewhat depending on the cell type that is selected. However, such variations may be made without departing from the scope and spirit of the present invention.

[0255] Association of the First and/or Second Recombinant Polypeptides, Multimeric-Protein-Complexes, Heteromultimeric-Protein-Complexes, Multimeric-Fusion-Proteins, Heteromultimeric-Fusion-Proteins, Immunoglobulins, Immunoglobulin-Polypeptide-Chains, Redox-Fusion-Polypeptides, the First and/or Second Thioredoxin-Related Proteins with Oil Bodies.

[0256] In accordance with the present invention, the oil bodies are associated with either the first and/or second recombinant polypeptides, multimeric-protein-complexes, heteromultimeric-protein-complexes, multimeric-fusion-proteins, heteromultimeric-fusion-proteins, immunoglobulins, immunoglobulin-polypeptide-chains, redox-fusion-polypeptides, the first and/or second thioredoxin-related proteins through association with an oil-body-targeting-protein capable of association with these multimeric-protein-complexes and the oil bodies. As used herein the phrase “associating the oil bodies with the multimeric-protein-complex” means that the oil bodies are brought in proximity of the multimeric-protein-complexes in a manner that allows the association of the oil bodies with either the first and/or second recombinant polypeptides, multimeric-protein-complexes, heteromultimeric-protein-complexes, multimeric-fusion-proteins, heteromultimeric-fusion-proteins, immunoglobulins, immunoglobulin-polypeptide-chains, redox-fusion-polypeptides, or the first and/or second thioredoxin-related proteins. The association of the oil bodies with the multimeric-protein-complexes is accomplished by association of the oil-body-targeting-protein with both the oil body and with the multimeric-protein-complex. In particular embodiments, the cells expressing the multimeric-protein-complex associate with the oil bodies that are obtainable from these same cells, which permits the convenient production and isolation of the multimeric-protein-complex, including the first and/or second recombinant polypeptides, heteromultimeric-protein-complexes, multimeric-fusion-proteins, heteromultimeric-fusion-proteins, immunoglobulins, immunoglobulin-polypeptide-chains, redox-fusion-polypeptides, or the first and/or second thioredoxin-related proteins, in an oil body-comprising host cell system. Accordingly, in one embodiment, the association of the oil body with the multimeric-protein-complex is accomplished intracellularly during the growth of the cell. For example, a redox fusion polypeptide may be fused to an oil-body-protein and the chimeric protein may be expressed in oil body-containing plant seeds. Isolation of the oil bodies from the seeds in this case results in isolation of oil bodies comprising either the first and/or second recombinant polypeptides, multimeric-protein-complexes, heteromultimeric-protein-complexes, multimeric-fusion-proteins, heteromultimeric-fusion-proteins, immunoglobulins, immunoglobulin-polypeptide-chains, redox-fusion-polypeptides, or the first and/or second thioredoxin-related proteins. In another embodiment, in which the multimeric-protein-complex associates with oil bodies obtainable from the same cells in which the complex is produced, the association of the oil bodies with the multimeric-protein-complex is accomplished upon disrupting the cell's integrity.

[0257] For example, the first and/or second recombinant polypeptides, multimeric-protein-complexes, heteromultimeric-protein-complexes, multimeric-fusion-proteins, heteromultimeric-fusion-proteins, immunoglobulins, immunoglobulin-polypeptide-chains, redox-fusion-polypeptides, or the first and/or second thioredoxin-related proteins may be expressed in such a manner that it is targeted to the endomembrane system of the seed cells. Oil bodies present in the same seed cells comprising an oil-body-targeting-protein capable of association with these multimeric-protein-complexes, for example an oleosin linked to a single chain antibody capable of association with a recombinant polypeptide or multimeric-protein-complex, may then associate with the recombinant polypeptide or multimeric-protein-complex upon grinding of the seed.

[0258] In accordance with this embodiment, plant seed cells comprising a light and heavy chain of an immunoglobulin targeted to the plant apoplast can be prepared. These particular seed cells are prepared to further comprise oil bodies associated with an oil-body-targeting-protein capable of association with the immunoglobulin, such as for example, an oleosin-protein A fusion protein, and the like. Upon grinding of the seed, the oil bodies comprising protein A associate with the immunoglobulin through binding.

[0259] In yet another embodiment, the oil bodies used to associate with the multimeric-protein-complex are obtained from a cellular source different from the cell comprising the first and/or second recombinant polypeptides, multimeric-protein-complexes, heteromultimeric-protein-complexes, multimeric-fusion-proteins, heteromultimeric-fusion-proteins, immunoglobulins, immunoglobulin-polypeptide-chains, redox-fusion-polypeptides, or the first and/or second thioredoxin-related proteins, such as from a separate plant line. For example, oil bodies associated with protein A may be prepared from one plant line. These oil bodies may then be mixed with ground seeds comprising an apoplastically expressed light and heavy chain constituting an immunoglobulin. Alternatively, a plant line comprising oil bodies associated with protein A may be crossed with a plant line comprising an immunoglobulin.

[0260] The first recombinant polypeptide, second recombinant polypeptide and oil-body-targeting-protein may also be prepared in separate cellular compartments. Association of the first polypeptide, second polypeptide, and oil body then may occur upon disruption of the cell's integrity. For exmple, various mechanisms for targeting gene products are known to exist in plants, and the sequences controlling the functioning of these mechanisms have been characterized in some detail. For example, the targeting of gene products to the chloroplast is controlled by a transit sequence found at the amino terminal end of various proteins which is cleaved during chloroplast import to yield the mature protein (Comai et al. (1988) J Biol Chem 263: 15104-15109). Other gene products are localized to other organelles such as the mitochondrion and the peroxisome (Unger et al. (1989) Plant Mol Biol 13:411-418). The cDNAs encoding these products can be manipulated to target heterologous gene products to these organelles. In addition, sequences have been characterized which cause the targeting of gene products to other cell compartments.

[0261] Amino terminal sequences are responsible for targeting to the ER, the apoplast, and extracellular secretion from aleurone cells (Koehler & Ho (1990) Plant Cell 2:769-783). Additionally, amino terminal sequences in conjunction with carboxy terminal sequences are responsible for vacuolar targeting of gene products (Shinshi et al., (1990) Plant Mol Biol 14:357-368). By the fusion of the appropriate targeting sequences described above to transgene sequences of interest it is possible to direct the transgene product to the desired organelle or cell compartment.

[0262] As hereinbefore mentioned, the redox protein obtained using the methods provided herein is enzymatically active while associated with the oil body. Preferably the redox protein is at least 5 times more active when produced as a redox fusion polypeptide with a second redox protein relative to its production in association with an oil body as a non-fusion polypeptide (i.e. without the second redox protein). More preferably the redox protein is at least 10 times more active when produced as a redox fusion polypeptide.

[0263] The activity of the redox fusion polypeptide may be determined in accordance with methodologies generally known to the art (see for example: Johnson et al (1984) J. of Bact. Vol. 158 3:1061-1069) and may be optimized by for example the addition of detergents, including ionic and non-ionic detergents.

[0264] Formulation of Oil Bodies

[0265] In accordance with a particular embodiment, the oil bodies comprising the first and/or second recombinant polypeptides, multimeric-protein-complexes, heteromultimeric-protein-complexes, multimeric-fusion-proteins, heteromultimeric-fusion-proteins, immunoglobulins, immunoglobulin-polypeptide-chains, redox-fusion-polypeptides, or the first and/or second thioredoxin-related proteins, are preferably formulated into an emulsion. The emulsion is preferably used in the preparation of a pharmaceutical composition, personal care or a food product. In emulsified form, the oil body offers certain desirable properties, such as for example excellent compatibility with the human skin.

[0266] It particular embodiments, the oil body formulation is stabilized so that a final product may be obtained which may be stored and preserved for longer periods of time. As used herein, the term “stabilized oil body preparation” refers to an oil body preparation that is prepared so that the formulation does not undergo undesirable physical or chemical alterations when the oil body preparation is stored. The stabilization requirements may vary depending on the final product. For example personal care products are preferably stable for at least one year at room temperature while additionally being able to withstand short temperature fluctuations. Pharmaceutical formulations may in some cases be less stable as they may be stored at lower temperatures thereby preventing the occurrence of undesirable reactions.

[0267] In general, stabilization techniques that may be used herein include any and all methods for the preservation of biological material including the addition of chemical agents, temperature modulation based methodologies, radiation-based technologies and combinations thereof. In particular embodiments small amounts of stabilizing chemical agents are mixed with the oil body formulation to achieve stabilization. These chemical agents include inter alia preservatives, antioxidants, acids, salts, bases, viscosity modifying agents, emulsifiers, gelling agents and mixtures thereof and may all be used to stabilize the oil body preparation. In view of the presence of the redox fusion polypeptide the stabilizing agent is generally selected to be compatible with and resulting in good enzymatic function of the redox fusion polypeptide.

[0268] Diagnostic parameters to assess the stability of the oil body preparation may be as desired and include all parameters indicative of undesirable qualitative or quantitative changes with respect to chemical or physical stability. Typical parameters to assess the oil body preparation over time include color, odor, viscosity, texture, pH and microbial growth, and enzymatic activity.

[0269] In particular embodiments, the oil body formulation is stabilized prior to the addition of further ingredients that may be used to prepare the final product. Howevera, in other embodiments, it is nevertheless possible to formulate the final formulation using non-stabilized oil bodies and stabilize the final formulation. The final preparations may be obtained using one or more additional ingredients and any formulation process suitable for the preparation of a formulation comprising oil bodies. Ingredients and processes employed will generally vary depending on the desired use of the final product, will be art recognized and may be as desired. Ingredients and processes that may be used herein include those described in U.S. patents (U.S. Pat. Nos. 6,146,645 and 6,183,762) which are incorporated by reference herein.

[0270] In particular embodiments, the redox fusion polypeptide comprises a thioredoxin and a thioredoxin-reductase. Accordingly, provided herein are oil bodies comprising a thioredoxin/thioredoxin-reductase fusion polypeptide. Also provided herein is a formulation containing oil bodies comprising a thioredoxin/thioredoxin-reductase fusion capable of treating or protecting a target against oxidative stress. The stress of the target is treated or prevented by contacting the target with the formulation. The target may be any substance susceptible to oxidative stress, including any molecule, molecular complex, cell, tissue or organ.

[0271] In another embodiment, provided herein is a formulation containing oil bodies comprising a thioredoxin/thioredoxin-reductase fusion capable of chemically reducing a target. Contacting the target with the formulation reduces the target. The target may be any substance susceptible to reduction, including any molecule or molecular complex. Particularly susceptible targets in this regard are the disulfide bonds present in proteins.

[0272] The oil bodies comprising thioredoxin/thioredoxin-reductase may be used to prepare formulations used to reduce the allergenicity of food or increase the digestibility of food. Preferably, the method of reducing the food allergenicity is practiced by mixing the thioredoxin/thioredoxin-reductase comprising oil bodies with food or food ingredients selected from a variety of sources including for example wheat flour, wheat dough, milk, cheese, soya, yogurt and ice cream. The thioredoxin/thioredoxin-reductase comprising oil bodies may also be used to increase the digestibility of milk as well as other disulfide containing proteins (Jiao, J. et al. (1992) J. Agric. Food Chem 40: 2333-2336). Further food applications include the use of the oil thioredoxin/thioredoxin-reductase comprising oil bodies as a food additive to enhance dough strength and bread quality properties (Wong et al., (1993) J. Cereal Chem. 70: 113-114; Kobrehel et al. (1994) Gluten Proteins: Association of Cereal Research; Detmold, Germany).

[0273] Also provided herein are pharmaceutical compositions comprising, in a pharmaceutically active carrier: oil bodies comprising a thioredoxin/thioredoxin-reductase; oil bodies comprising multimeric-protein-complexes, such as heteromultimeric-protein-complexes; isolated thioredoxin/thioredoxin-reductase fusion proteins; or isolated multimeric-protein-complexes. These pharmaceutical compositions may be used for the treatment of reperfusion injury (Aota et al. (1996) J. Cardiov. Pharmacol. (1996) 27: 727-732), cataracts (U.S. patent U.S. Pat. No. 4,771,036), chronic obstructive pulmonary disease (COPD) (MacNee et al. (1999) Am. J. Respir. Crit. Care Med. 160:S58-S65), diabetes (Hotta et al. J. Exp. Med. 188: 1445-1451), envenomation (PCT Patent Application 99/20122; U.S. Pat. No. 5,792,506), bronchiopulmonary disease (MacNee (2000) Chest 11 7:3035-3175); malignancies (PCT Patent Application 91/04320) and the alleviation of the allergenic potential of airborne, for example pollen-derived, and contact allergens (PCT Patent Application 00/44781). Other diseases or conditions that may be treated with the pharmaceutical compositions provided herein include: psoriasis, wound healing, sepsis, GI bleeding, intestinal bowel disease (IBD), ulcers, transplantation, GERD (gastro esophageal reflux disease).

[0274] In another embodiment, the pharmaceutical compositions provided herein, particularly those comprising one or more redox proteins alone or in combination with oil bodies, can be used in the treatment of inflammatory and viral diseases by reductively inactivating phospholipase A2, one of the contributing factors in inflammatory diseases. Additionally, the redox fusion polypeptide system has been found to function as a self-defense mechanism in response to environmental stimuli, including oxidative stress caused by UV-generated free radicals. Consequently, redox proteins, e.g., oleosin-thioredoxin, oleosin-thioredoxin-reductase, the various redox fusion polypeptides described herein, provide beneficial effects in certain skin conditions such as psoriasis, skin cancer, dandruff, diaper rash, dermatitis, acne, sun damage, aging, inflammation, and the like.

[0275] In another embodiment, oil-body-thioredoxin-related fusion proteins, e.g., oleosin-Thioredoxin-reductase, can also be used as a venom antidote. Many animal venoms and other toxins contain disulfide bonds, including all snake venom neurotoxins, some bacterial neurotoxins including tetanus and botulinum A, bee venom phospholipase A₂, and scorpion venom. In a further embodiment, the redox protein related pharmaceutical compositions provided herein can be used to inactivate venom toxins by reduction of disulfide bonds. A method of treating an individual suffering from the effects of a venom or toxin can include the step of administering an effective dose of a pharmaceutical composition, in a pharmaceutically effective carrier in an amount sufficient to relieve or reverse the effects of the venom toxin on the individual.

[0276] The pharmaceutical compositions provided herein are preferably formulated for single dosage administration. The concentrations of the compounds in the formulations are effective for delivery of an amount, upon administration, that is effective for the intended treatment. Typically, the compositions are formulated for single dosage administration. To formulate a composition, the weight fraction of a compound or mixture thereof is dissolved, suspended, dispersed or otherwise mixed in a selected vehicle at an effective concentration such that the treated condition is relieved or ameliorated. Pharmaceutical carriers or vehicles suitable for administration of the compounds provided herein include any such carriers known to those skilled in the art to be suitable for the particular mode of administration.

[0277] In addition, the compounds may be formulated as the sole pharmaceutically active ingredient in the composition or may be combined with other active ingredients. Liposomal suspensions, including tissue-targeted liposomes, may also be suitable as pharmaceutically acceptable carriers. These may be prepared according to methods known to those skilled in the art. For example, liposome formulations may be prepared as described in U.S. Pat. No. 4,522,811.

[0278] The active compound is included in the pharmaceutically acceptable carrier in an amount sufficient to exert a therapeutically useful effect in the absence of undesirable side effects on the patient treated. The therapeutically effective concentration may be determined empirically by testing the compounds in known in vitro and in vivo systems, such as the assays provided herein.

[0279] The concentration of active compound in the drug composition will depend on absorption, inactivation and excretion rates of the active compound, the physicochemical characteristics of the compound, the dosage schedule, and amount administered as well as other factors known to those of skill in the art.

[0280] Typically a therapeutically effective dosage is contemplated. The amounts administered may be on the order of 0.001 to 1 mg/ml, preferably about 0.005-0.05 mg/ml, more preferably about 0.01 mg/ml, of blood volume. Pharmaceutical dosage unit forms are prepared to provide from about 1 mg to about 1000 mg and preferably from about 10 to about 500 mg, more preferably about 25-75 mg of the essential active ingredient or a combination of essential ingredients per dosage unit form. The precise dosage can be empirically determined.

[0281] The active ingredient may be administered at once, or may be divided into a number of smaller doses to be administered at intervals of time. It is understood that the precise dosage and duration of treatment is a function of the disease being treated and may be determined empirically using known testing protocols or by extrapolation from in vivo or in vitro test data. It is to be noted that concentrations and dosage values may also vary with the severity of the condition to be alleviated. It is to be further understood that for any particular subject, specific dosage regimens should be adjusted over time according to the individual need and the professional judgment of the person administering or supervising the administration of the compositions, and that the concentration ranges set forth herein are exemplary only and are not intended to limit the scope or use of the claimed compositions and combinations containing them.

[0282] Preferred pharmaceutically acceptable derivatives include acids, salts, esters, hydrates, solvates and prodrug forms. The derivative is typically selected such that its pharmacokinetic properties are superior to the corresponding neutral compound.

[0283] Thus, effective concentrations or amounts of one or more of the compounds provided herein or pharmaceutically acceptable derivatives thereof are mixed with a suitable pharmaceutical carrier or vehicle for systemic, topical or local administration to form pharmaceutical compositions. Compounds are included in an amount effective for ameliorating or treating the disorder for which treatment is contemplated. The concentration of active compound in the composition will depend on absorption, inactivation, excretion rates of the active compound, the dosage schedule, amount administered, particular formulation as well as other factors known to those of skill in the art.

[0284] Solutions or suspensions used for parenteral, intradermal, subcutaneous, or topical application can include any of the following components: a sterile diluent, such as water for injection, saline solution, fixed oil, polyethylene glycol, glycerine, propylene glycol or other synthetic solvent; antimicrobial agents, such as benzyl alcohol and methyl parabens; antioxidants, such as ascorbic acid and sodium bisulfite; chelating agents, such as ethylenediaminetetraacetic acid (EDTA); buffers, such as acetates, citrates and phosphates; and agents for the adjustment of tonicity such as sodium chloride or dextrose. Parenteral preparations can be enclosed in ampules, disposable syringes or single or multiple dose vials made of glass, plastic or other suitable material.

[0285] In instances in which the compounds exhibit insufficient solubility, methods for solubilizing compounds may be used. Such methods are known to those of skill in this art, and include, but are not limited to, using cosolvents, such as dimethylsulfoxide (DMSO), using surfactants, such as Tween®, or dissolution in aqueous sodium bicarbonate. Derivatives of the compounds, such as prodrugs of the compounds may also be used in formulating effective pharmaceutical compositions. For ophthalmic indications, the compositions are formulated in an ophthalmically acceptable carrier. For the ophthalmic uses herein, local administration, either by topical administration or by injection is preferred. Time release formulations are also desirable. Typically, the compositions are formulated for single dosage administration, so that a single dose administers an effective amount.

[0286] Upon mixing or addition of the compound with the vehicle, the resulting mixture may be a solution, suspension, emulsion or other composition. The form of the resulting mixture depends upon a number of factors, including the intended mode of administration and the solubility of the compound in the selected carrier or vehicle. If necessary, pharmaceutically acceptable salts or other derivatives of the compounds are prepared.

[0287] The compound is included in the pharmaceutically acceptable carrier in an amount sufficient to exert a therapeutically useful effect in the absence of undesirable side effects on the patient treated. It is understood that number and degree of side effects depends upon the condition for which the compounds are administered. For example, certain toxic and undesirable side effects are tolerated when treating life-threatening illnesses that would not be tolerated when treating disorders of lesser consequence.

[0288] The compounds can also be mixed with other active materials, that do not impair the desired action, or with materials that supplement the desired action known to those of skill in the art. The formulations of the compounds and agents for use herein include those suitable for oral, rectal, topical, inhalational, buccal (e.g., sublingual), parenteral (e.g., subcutaneous, intramuscular, intradermal, or intravenous), transdermal administration or any route. The most suitable route in any given case will depend on the nature and severity of the condition being treated and on the nature of the particular active compound which is being used. The formulations are provided for administration to humans and animals in unit dosage forms, such as tablets, capsules, pills, powders, granules, sterile parenteral solutions or suspensions, and oral solutions or suspensions, and oil-water emulsions containing suitable quantities of the compounds or pharmaceutically acceptable derivatives thereof. The pharmaceutically therapeutically active compounds and derivatives thereof are typically formulated and administered in unit-dosage forms or multiple-dosage forms. Unit-dose forms as used herein refers to physically discrete units suitable for human and animal subjects and packaged individually as is known in the art. Each unit-dose contains a predetermined quantity of the therapeutically active compound sufficient to produce the desired therapeutic effect, in association with the required pharmaceutically acceptable carrier, vehicle or diluent. Examples of unit-dose forms include ampoules and syringes and individually packaged tablets or capsules. Unit-dose forms may be administered in fractions or multiples thereof. A multiple-dose form is a plurality of identical unit-dosage forms packaged in a single container to be administered in segregated unit-dose form. Examples of multiple-dose forms include vials, bottles of tablets or capsules or bottles of pints or gallons. Hence, multiple dose form is a multiple of unit-doses which are not segregated in packaging.

[0289] The composition can contain along with the active ingredient: a diluent such as lactose, sucrose, dicalcium phosphate, or carboxymethyl-cellulose; a lubricant, such as magnesium stearate, calcium stearate and talc; and a binder such as starch, natural gums, such as gum acaciagelatin, glucose, molasses, polvinylpyrrolidine, celluloses and derivatives thereof, povidone, crospovidones and other such binders known to those of skill in the art. Liquid pharmaceutically administrable compositions can, for example, be prepared by dissolving, dispersing, or otherwise mixing an active compound as defined above and optional pharmaceutical adjuvants in a carrier, such as, for example, water, saline, aqueous dextrose, glycerol, glycols, ethanol, and the like, to thereby form a solution or suspension. If desired, the pharmaceutical composition to be administered may also contain minor amounts of nontoxic auxiliary substances such as wetting agents, emulsifying agents, or solubilizing agents, pH buffering agents and the like, for example, acetate, sodium citrate, cyclodextrine derivatives, sorbitan monolaurate, triethanolamine sodium acetate, triethanolamine oleate, and other such agents. Methods of preparing such dosage forms are known, or will be apparent, to those skilled in this art (see, e.g., Remington's Pharmaceutical Sciences, Mack Publishing Company, Easton, Pa., 15th Edition, 1975). The composition or formulation to be administered will contain a quantity of the active compound in an amount sufficient to alleviate the symptoms of the treated subject.

[0290] Dosage forms or compositions containing active ingredient in the range of 0.005% to 100% with the balance made up from non-toxic carrier may be prepared. For oral administration, the pharmaceutical compositions may take the form of, for example, tablets or capsules prepared by conventional means with pharmaceutically acceptable excipients such as binding agents (e.g., pregelatinized maize starch, polyvinyl pyrrolidone or hydroxypropyl methylcellulose); fillers (e.g., lactose, microcrystalline cellulose or calcium hydrogen phosphate); lubricants (e.g., magnesium stearate, talc or silica); disintegrants (e.g., potato starch or sodium starch glycolate); or wetting agents (e.g., sodium lauryl sulphate). The tablets may be coated by methods well-known in the art.

[0291] The pharmaceutical preparation may also be in liquid form, for example, solutions, syrups or suspensions, or may be presented as a drug product for reconstitution with water or other suitable vehicle before use. Such liquid preparations may be prepared by conventional means with pharmaceutically acceptable additives such as suspending agents (e.g., sorbitol syrup, cellulose derivatives or hydrogenated edible fats); emulsifying agents (e.g., lecithin or acacia); non-aqueous vehicles (e.g., almond oil, oily esters, or fractionated vegetable oils); and preservatives (e.g., methyl or propyl-p-hydroxybenzoates or sorbic acid).

[0292] Formulations suitable for rectal administration are preferably presented as unit dose suppositories. These may be prepared by admixing the active compound with one or more conventional solid carriers, for example, cocoa butter, and then shaping the resulting mixture.

[0293] Formulations suitable for topical application to the skin or to the eye preferably take the form of an ointment, cream, lotion, paste, gel, spray, aerosol and oil. Carriers which may be used include vaseline, lanoline, polyethylene glycols, alcohols, and combinations of two or more thereof. The topical formulations may further advantageously contain 0.05 to 15 percent by weight of thickeners selected from among hydroxypropyl methyl cellulose, methyl cellulose, polyvinylpyrrolidone, polyvinyl alcohol, poly (alkylene glycols), poly/hydroxyalkyl, (meth)acrylates or poly(meth)acrylamides. A topical formulation is often applied by instillation or as an ointment into the conjunctival sac. It can also be used for irrigation or lubrication of the eye, facial sinuses, and external auditory meatus. It may also be injected into the anterior eye chamber and other places. The topical formulations in the liquid state may be also present in a hydrophilic three-dimensional polymer matrix in the form of a strip, contact lens, and the like from which the active components are released.

[0294] For administration by inhalation, the compounds for use herein can be delivered in the form of an aerosol spray presentation from pressurized packs or a nebulizer, with the use of a suitable propellant, e.g., dichlorodi-fluoromethane, trichlorofluoromethane, dichlorotetrafluoroethane, carbon dioxide or other suitable gas. In the case of a pressurized aerosol, the dosage unit may be determined by providing a valve to deliver a metered amount. Capsules and cartridges of, e.g., gelatin, for use in an inhaler or insufflator may be formulated containing a powder mix of the compound and a suitable powder base such as lactose or starch.

[0295] Formulations suitable for buccal (sublingual) administration include, for example, lozenges containing the active compound in a flavored base, usually sucrose and acacia or tragacanth; and pastilles containing the compound in an inert base such as gelatin and glycerin or sucrose and acacia.

[0296] The compounds may be formulated for parenteral administration by injection, e.g., by bolus injection or continuous infusion. Formulations for injection may be presented in unit dosage form, e.g., in ampules or in multi-dose containers, with an added preservative. The compositions may be suspensions, solutions or emulsions in oily or aqueous vehicles, and may contain formulatory agents such as suspending, stabilizing and/or dispersing agents. Alternatively, the active ingredient may be in powder form for reconstitution with a suitable vehicle, e.g., sterile pyrogen-free water or other solvents, before use.

[0297] Formulations suitable for transdermal administration may be presented as discrete patches adapted to remain in intimate contact with the epidermis of the recipient for a prolonged period of time. Such patches suitably contain the active compound as an optionally buffered aqueous solution of, for example, 0.1 to 0.2 M concentration with respect to the active compound. Formulations suitable for transdermal administration may also be delivered by iontophoresis (see, e.g., Pharmaceutical Research 3 (6), 318 (1986)) and typically take the form of an optionally buffered aqueous solution of the active compound.

[0298] The pharmaceutical compositions may also be administered by controlled release means and/or delivery devices (see, e.g., in U.S. Pat. Nos. 3,536,809; 3,598,123; 3,630,200; 3,845,770; 3,847,770; 3,916,899; 4,008,719; 4,687,610; 4,769,027; 5,059,595; 5,073,543; 5,120,548; 5,354,566; 5,591,767; 5,639,476; 5,674,533 and 5,733,566).

[0299] Desirable blood levels may be maintained by a continuous infusion of the active agent as ascertained by plasma levels. It should be noted that the attending physician would know how to and when to terminate, interrupt or adjust therapy to lower dosage due to toxicity, or bone marrow, liver or kidney dysfunctions. Conversely, the attending physician would also know how to and when to adjust treatment to higher levels if the clinical response is not adequate (precluding toxic side effects).

[0300] The efficacy and/or toxicity of the pharmaceutical compositions provided herein, alone or in combination with other agents can also be assessed by the methods known in the art (See generally, O'Reilly, Investigational New Drugs, 15:5-13 (1997)).

[0301] The active compounds or pharmaceutically acceptable derivatives may be prepared with carriers that protect the compound against rapid elimination from the body, such as time release formulations or coatings.

[0302] Kits containing the compositions and/or the combinations with instructions for administration thereof are provided. The kit may further include a needle or syringe, preferably packaged in sterile form, for injecting the complex, and/or a packaged alcohol pad. Instructions are optionally included for administration of the active agent by a clinician or by the patient.

[0303] Finally, the pharmaceutical compositions provided herein containing any of the preceding agents may be packaged as articles of manufacture containing packaging material, a compound or suitable derivative thereof provided herein, which is effective for treatment of a diseases or disorders contemplated herein, within the packaging material, and a label that indicates that the compound or a suitable derivative thereof is for treating the diseases or disorders contemplated herein. The label can optionally include the disorders for which the therapy is warranted.

[0304] Also provided herein are personal care formulations containing oil bodies comprising a thioredoxin/thioredoxin-reductase fusion polypeptide. Personal care products comprising thioredoxin and thioredoxin-reductase are disclosed in for example Japanese Patent Applications JP9012471A2, JP103743A2, and JP1129785A2 Personal care formulations that may be prepared in accordance with the present invention include formulations capable of improving the physical appearance of skin exposed to detrimental environmental stimuli resulting in oxidative stress for example oxidative stress caused by UV-generated free-radicals. The oil bodies comprising thioredoxin/thioredoxin-reductase may also be used to prepare hair care products as described in U.S. Pat. Nos. 4,935,231 and 4,973,475 (incorporated herein by reference in their entirety).

[0305] The following examples are included for illustrative purposes only and are not intended to limit the scope of the invention.

### EXAMPLE 1

[0306] Isolation of Thioredoxin and NADPH Thioredoxin-Reductase Genes

[0307] An Arabidopsis silique cDNA library CD4-12 was obtained from the Arabidopsis Biological Resource Centre (ABRC, http://aims.cps.msu.edu) Arabidopsis stock centre and used as a template for the isolation of the thioredoxin h (Trxh) and thioredoxin-reductase genes from Arabidopsis. For the isolation of the Trxh gene the following primers were synthesized:

[0308] GVR833: 5′TACCATGGCTTCGGAAGAAGGA 3′ (SEQ ID NO:1)

[0309] The sequence identical to the 5′ end of the Trxh gene as published in Rivera-Madrid et al, (1993) Plant Physiol 102: 327-328, is indicated in bold. Underlined is an NcoI restriction site to facilitate cloning. GVR834:

[0310] 5′GAAAGCTTAAGCCAAGTGTTTG 3′ (SEQ ID NO:2)

[0311] The sequence complementary to the 3′ end of the Trxh gene as published in Rivera-Madrid et al, (1993) Plant Physiol 102: 327-328, is indicated in bold. Underlined is an Hindlul restriction site to facilitate cloning.

[0312] A Polymerase Chain Reaction (PCR) was carried out using GVR833 and GVR834 as primers and the cDNA library CD4-12 as a template. The resulted PCR fragment was isolated, cloned into pBluescript and sequenced. The isolated sequence encoding Trxh was identical to the published Trxh gene sequence (Rivera-Madrid et al, (1993) Plant Physiol 102: 327-328). The pBluescript vector containing the Trxh gene is called pSBS2500.

[0313] For the isolation of the thioredoxin-reductase gene the following primers were synthesized:

[0314] GVR836: 5′ GGCCAGCACACTACCATGAATGGTCTCGAAACTCAC 3′ (SEQ ID NO:3). The sequence identical to the 5′ end of the thioredoxin-reductase gene as published (Jacquot et al, J Mol Biol. (1994) 235 (4):1357-63), is indicated in bold).

[0315] GVR837: 5′ TTAAGCTTCAATCACTCTTACCTTGCTG 3′ (SEQ ID NO:4).

[0316] A Polymerase Chain Reaction (PCR) was carried out using GVR836 and GVR837 as primers and the cDNA library CD4-12 as a template. The resulted PCR fragment was isolated, cloned into pBluescript and sequenced. The pBluescript vector containing the thioredoxin-reductase gene is called pSBS2502.

[0317] A total of three clones were sequenced, the sequence of each of the three clones were identical to each other. However, as depicted in FIG. 1 this sequence indicated several nucleotide differences compared to the published thioredoxin-reductase gene sequence published (Jacquot et al, J Mol Biol. (1994) 235 (4):1357-63.). The complete coding sequence and its deduced amino acid sequence is shown in SEQ ID NO:10. As a result of the nucleotide differences between the published sequence and the sequence isolated in Example 1, several amino acid changes are also predicted. A comparison of the deduced amino acid sequence of the published NADPH thioredoxin-reductase sequence thioredoxin-reductase (ATTHIREDB, Jacquot et al, J Mol Biol. (1994) 235 (4):1357-63.) with the sequence isolated in Example 1 (TR) is shown in FIG. 3.

### EXAMPLE 2

[0318] Construction of Plant Expression Vectors.

[0319] Expression vectors were constructed to allow for the seed specific over-expression of thioredoxin and NADPH thioredoxin-reductase in seeds. Vectors were constructed to allow for over-expression in its natural subcellular location and for accumulation on oilbodies.

[0320] Construction of Plant Transformation Vector pSBS2520.

[0321] The Arabidopsis thioredoxin h gene as described in example 1 was placed under the regulatory control of the phaseolin promoter and the phaseolin terminator derived from the common bean Phaseolus vulgaris (Slightom et al (1983) Proc. Natl Acad Sc USA 80: 1897-1901; Sengupta-Gopalan et al., (1985) PNAS USA 82: 3320-3324)). A gene splicing by overlap extension technique (Horton et al (1989) 15: 61-68) was used to fuse the phaseolin promoter to the Trxh gene. Standard molecular biology laboratory techniques (see eg: Sambrook et al. (1990) Molecular Cloning, 2^{nd} ed. Cold Spring Harbor Press) were used to furnish the phaseolin promoter and terminator with Pst I and HindIII/KpnI sites respectively (see SEQ ID NO:14). Standard molecular biology laboratory techniques were also used to place the phaseolin terminator dowstream from the Trxh gene. The PstI-phaseolin promoter- Trxh-phaseolin terminator-KpnI insert sequence was cloned into the PstI-KpnI sites of pSBS3000 (pSBS3000 is a derivative from the Agrobacterium binary plasmid pPZP221 (Hajdukiewicz et al., 1994, Plant Molec. Biol. 25: 989-994). In pSBS3000, the CaMV35S promoter-gentamycin resistance gene-CAMV 35S terminator of pPZP221 was replaced with parsley ubiquitin promoter-phosphinothricin acetyl transferase gene-parsley ubiquitin termination sequence to confer resistance to the herbicide glufosinate ammonium.) The resulting plasmid is called pSBS2520. The sequence of the phaseolin promoter-Arabidopsis Trxh-phaseolin terminator sequence is shown in SEQ ID NO:14.

[0322] Construction of Plant Transformation Vector pSBS2510.

[0323] The 3′ coding sequence of an Arabidopsis oleosin gene (van Rooijen et al (1992) Plant Mol. Biol.18: 1177-1179) was altered to contain an NcoI site. The NcoI-HindIII fragment from vector pSBS2500 (Example 1) containing the Trxh was ligated to the coding sequence of this Arabidopsis oleosin utilizing this NcoI restriction site. A gene splicing by overlap extension technique (Horton et al (1989) 15: 61-68) was used to fuse the phaseolin promoter (Slightom et al (1983) Proc. Natl Acad Sc USA 80:1897-1901; Sengupta-Gopalan et al., (1985) PNAS USA 82: 3320-3324) containing a synthetic PstI site (see construction of pSBS2520) to the coding sequence of the Arabidopsis oleosin. Standard molecular biology laboratory techniques (see eg: Sambrook et al. (1990) Molecular Cloning, 2^{nd} ed. Cold Spring Harbor Press) were again used to clone the HindIII KpnI fragment containing the phaseolin terminator (see construction of pSBS2520) dowstream of the Trxh gene. The PstI-phaseolin promoter-oleosin-Trxh-phaseolin terminator-KpnI insert sequence was cloned into the PstI-KpnI sites of pSBS3000. The resulting plasmid is called pSBS2510. The sequence of the phaseolin promoter-oleosin Trxh-phaseolin terminator sequence is shown in SEQ ID NO:16.

[0324] Construction of Plant Transformation Vector pSBS2521.

[0325] This vector contains the same genetic elements as the insert of pSBS2510 except the Trxh gene is fused to the 5′ end of the oleosin gene. The 3′ oleosin coding sequence including its native stopcodon (van Rooijen et al (1992) Plant Mol. Biol.18: 1177-1179) was furnished with a HindIII cloning site. Again a gene splicing by overlap extension technique (Horton et al (1989) 15: 61-68) was used to fuse the phaseolin promoter to the Trxh gene and to fuse the Trxh gene to the oleosin sequence. Standard molecular biology laboratory techniques (see eg: Sambrook et al. (1990) Molecular Cloning, 2^{nd} ed. Cold Spring Harbor Press) were again used to clone the HindIII KpnI fragment containing the phaseolin terminator (see construction of pSBS2520) dowstream of the oleosin gene. The PstI-phaseolin promoter-Trxh oleosin-phaseolin terminator-KpnI insert sequence was cloned into the PstI-KpnI sites of pSBS3000. The resulting plasmid is called pSBS2521. The sequence of the phaseolin promoter-Trxh oleosin-phaseolin terminator sequence is shown in SEQ ID NO:19.

[0326] Construction of Plant Transformation Vector pSBS2527.

[0327] The Arabidopsis NADPH thioredoxin-reductase gene as described in example 1 was placed under the regulatory control of the phaseolin promoter and the phaseolin terminator derived from the common bean Phaseolus vulgaris (Slightom et al (1983) Proc. Natl Acad Sc USA 80: 1897-1901; Sengupta-Gopalan et al., (1985) PNAS USA 82: 3320-3324). A gene splicing by overlap extension technique (Horton et al (1989) 15: 61-68) was used to fuse the phaseolin promoter to the thioredoxin-reductase gene. Standard molecular biology laboratory techniques (see eg: Sambrook et al. (1990) Molecular Cloning, 2^{nd} ed. Cold Spring Harbor Press) were used to furnish the phaseolin promoter and terminator with PstI and HindIII/KpnI sites respectively (see SEQ ID NO:14). Standard molecular biology laboratory techniques were also used to place the phaseolin terminator dowstream from the thioredoxin-reductase gene. The PstI-phaseolin promoter-thioredoxin-reductase-phaseolin terminator-KpnI insert sequence was cloned into the PstI-KpnI sites of pSBS3000 The resulting plasmid is called pSBS2527. The sequence of the phaseolin promoter-Arabidopsis thioredoxin-reductase-phaseolin terminator sequence is shown in SEQ ID NO:22.

[0328] Construction of Plant Transformation Vector pSBS2531.

[0329] A gene splicing by overlap extension technique (Horton et al (1989) 15: 61-68) was used to fuse the phaseolin promoter (Slightom et al (1983) Proc. Natl Acad Sc USA 80: 1897-1901; Sengupta-Gopalan et al., (1985) PNAS USA 82: 3320-3324) to the coding sequence of the Arabidopsis oleosin. The same gene splicing technique was used to fuse the oleosin gene to the thioredoxin-reductase coding sequence. Standard molecular biology laboratory techniques (see eg: Sambrook et al. (1990) Molecular Cloning, 2^{nd} ed. Cold Spring Harbor Press) were again used to clone the HindIII KpnI fragment containing the phaseolin dowstream of the thioredoxin-reductase gene. The PstI-phaseolin promoter-oleosin-thioredoxin-reductase-phaseolin terminator-KpnI insert sequence was cloned into the PstI-KpnI sites of pSBS3000. The resulting plasmid is called pSBS2531. The sequence of the phaseolin promoter-oleosin thioredoxin-reductase-phaseolin terminator sequence is shown in SEQ ID NO:24.

[0330] Construction of Plant Transformation Vector pSBS2529

[0331] This vector contains the same genetic elements as the insert of pSBS2531 except the thioredoxin-reductase gene is fused to the 5′ end of the oleosin gene. The 3′ oleosin coding sequence including its native stopcodon (van Rooijen et al. (1992) Plant Mol. Biol.18: 1177-1179) was furnished with a HindIII cloning site. Again a gene splicing by overlap extension technique (Horton et al (1989) 15: 61-68) was used to fuse the phaseolin promoter to the thioredoxin-reductase gene and to fuse the thioredoxin-reductase gene to the oleosin sequence. Standard molecular biology laboratory techniques (see eg: Sambrook et al. (1990) Molecular Cloning, 2^{nd} ed. Cold Spring Harbor Press) were again used to clone the HindIII KpnI fragment containing the phaseolin terminator (see construction of pSBS2520) dowstream of the oleosin gene. The PstI-phaseolin promoter-thioredoxin-reductase oleosin-phaseolin terminator-KpnI insert sequence was cloned into the PstI-KpnI sites of pSBS3000. The resulting plasmid is called pSBS2529. The sequence of the phaseolin promoter-thioredoxin-reductase oleosin-phaseolin terminator sequence is shown in SEQ ID NO:27.

[0332] Construction of Plant Transformation Vector pSBS2530.

[0333] A plant transformation was constructed containing the Mycobacterium Leprae thioredoxin-reductase/thioredoxin gene (Mlep TR/Trxh). A construct called pHIS/TR/Trxh (Wieles et al (1995) J Biol Chem 270:25604-25606) was obtained from the department of Immunohematology and Blood bank, Leiden University, The Netherlands and use as a template for PCR to generate pSBS2530. The construction of pSBS2530 was identical to the construction of pSBS2531 except that the Mlep TR/Trxh gene was used instead of the Arabidopsis thioredoxin-reductase gene. A gene splicing by overlap extension technique (Horton et al (1989) 15: 61-68) was used to fuse the phaseolin promoter (Slightom et al (1983) Proc. Natl Acad Sc USA 80: 1897-1901; Sengupta-Gopalan et al., (1985) PNAS USA 82: 3320-3324) to the coding sequence of the Arabidopsis oleosin. The same gene splicing technique was used to fuse the oleosin gene to the Mlep TR/Trxh coding sequence. Standard molecular biology laboratory techniques (see eg: Sambrook et al. (1990) Molecular Cloning, 2^{nd} ed. Cold Spring Harbor Press) were again used to clone the HindIII-KpnI fragment containing the phaseolin dowstream of the Mlep TR/Trxh gene. The PstI-phaseolin promoter-oleosin Mlep TR/Trxh-phaseolin terminator-KpnI insert sequence was cloned into the PstI-KpnI sites of pSBS3000. The resulting plasmid is called pSBS2530. The sequence of the phaseolin promoter-oleosin Mlep TR/Trxh-phaseolin terminator sequence is shown in SEQ ID NO:30.

[0334] Construction of Plant Transformation Vector pSBS2542.

[0335] From initial activity assays (FIG. 4), it was apparent that oil bodies expressing the oleosin-M. lep TR/Trxh fusion protein contained considerable reducing activity. It was anticipated that a similar oleosin fusion construct encoding the Arabidopsis thioredoxin-reductase and thioredoxin proteins would behave in an analogous manner. Molecular modeling was used to aid in the design of such a construct. Primers were designed (thioredoxin link-L: 5′-ACTGGAGATGTTGACTCGACGGATACTACGGATTGGTCGACGG CTATGGAAGAAGGACAAGTGATCGCCTGC-3′; (SEQ ID NO:5), and thioredoxin link-R:

[0336] 5′-ATCCGTCGAGTCAACATCTCCAGTTTCCTCGGTGGTCTCGTTAGCCT TCGATCCAGCAATCTCTTGTAAGAATGCTCTGC-3′; (SEQ ID NO:6) to code for a synthetic linker peptide between the thioredoxin-reductase and thioredoxin proteins. These primers were used in conjunction with primers GVR 873 (5′-GTGGAAGCT TATGGAGATGGAG-3′; SEQ ID NO:7) and GVR834 (5′-GAAAGCTTAAGCCAAGTGTTTG-3′; SEQ ID NO:2) to amplify a region coding for a thioredoxin-reductase-linker region-thioredoxin utilizing a gene splicing by overlap extension technique (Horton et al (1989) 15:61-68). The thioredoxin-reductase-linker-thioredoxin encoding sequence was then cloned into a pre-existing pSBS3000 vector using standard molecular biology techniques (Sambrook et al (1990) Molecular Cloning 2^{nd} Edition Cold Spring Harbour Press). The resulting plasmid was called pSBS2542. The sequence of the phaseolin promoter-oleosin-thioredoxin-reductase-linker-thioredoxin-phaseolin terminator region is shown in SEQ ID NO:33. An amino acid sequence comparison between this Arabidopsis thioredoxin-reductase-linker-thioredoxin and the M. leprae TR/Trxh protein is shown in FIG. 12.

[0337] Plasmids pSBS2510, pSBS2520, pSBS2521, pSBS2527, pSBS2529, pSBS2530, pSBS2531 and pSBS2542 were electroporated into Agrobacterium strain EHA101. These Agrobacterium strains were used to transform Arabidopsis. Arabidopsis transformation was done essentially as described in “Arabidopsis Protocols; Methods in molecular biology Vol 82. Edited by Martinez-Zapater J M and Salinas J. ISBN 0-89603-391-0 pg 259-266 (1998) except the putative transgenic plants were selected on agarose plates containing 80 μM L-phosphinothricine, after they were transplanted to soil and allowed to set seed.

### EXAMPLE 3

[0338] Polyacrylamide Gelelectrophoresis and Immunoblotting of Transgenic Seed Extracts.

[0339] Source of Arabidopsis Thioredoxin, Thioredoxin-Reductase and Oleosin Antibodies.

[0340] The Arabidopsis thioredoxin and thioredoxin-reductase genes were cloned in frame in bacterial expression vector pRSETB (Invtrogen) to allow for the overexpression of Arabidopsis thioredoxin and thioredoxin-reductase proteins. These proteins were purified using standard protocols (see eg Invitrogen protocol) and used to raise antibodies in rabbits using standard biochemical techniques (See eg Current Protocols in Molecular Biology, John Wiley & Sons, N.Y. (1989). The Arabidopsis oleosin gene genes was cloned in frame in bacterial expression vector pRSETB (Invitrogen) to allow for the overexpression Arabidopsis oleosin protein. This protein was purified using standard protocols (see eg Invitrogen protocol) and used to prepare mouse monoclonal antibodies using standard biochemical techniques (See eg Current Protocols in Molecular Biology, John Wiley & Sons, N.Y. (1989).

[0341] Preparation of Total Arabidopsis Seed Extracts for PAGE.

[0342] Arabidopsis seeds were ground in approximately 20 volumes of 2% SDS, 50 mM Tris-Cl, this extract was boiled, spun and the supernatant was prepared for polyacrylamide gelelectrophoresis (PAGE) using standard protocols.

[0343] Preparation of Arabidopsis Oil-Body-Protein Extracts.

[0344] Arabidopsis seeds were ground in approximately 20 volumes of water and spun in a microfuge. The oilbodies were recovered and washed sequentially with approximately 20 volumes of water, a high stringency wash buffer, containing 8M urea and 100 mM sodiumcarbonate and water. After this last wash the oilbodies are prepared for poly acrylamide gelelectrophoresis (PAGE) using standard protocols.

[0345] Analysis of Seed and Oil Body Extracts from Plants Transformed with pSBS2510

[0346] Total seed and oilbody protein extracts from plants transformed with pSBS2510 were loaded onto polyacrylamide gels and either stained with coomassie brilliant blue or electroblotted onto PVDF membranes. The membranes were challenged with with a polyclonal antibody raised against Arabidopsis thioredoxin, or a monoclonal antibody raised against the Arabidopsis 18.5 kDa oleosin and and visualized using alkaline phosphatase. Expression of the oleosin-thioredoxin results in an additional band of 31.2 kDa. The results indicate that the thioredoxin antibodies are immunologically reactive with a band of the right predicted molecular weight (31.2 kDa), and the oleosin antibodies are also immunologically reactive with a band of the right predicted molecular weight for the fusion protein (31.2 kDa) in addition to a band corresponding to the native Arabidopsis oleosin (18.5 kDa). This indicates that oleosin-thioredoxin is expressed in Arabidopsis seeds and is correctly targeted to oilbodies.

[0347] Analysis of Seed and Oil Body Extracts from Plants Transformed with pSBS2521

[0348] Total seed and oilbody protein extracts from plants transformed with pSBS25121 were loaded onto polyacrylamide gels and either stained with Coomassie brilliant blue or electroblotted onto PVDF membranes. The membranes were challenged with with a polyclonal antibody raised against Arabidopsis thioredoxin, or a monoclonal antibody raised against the Arabidopsis 18.5 kDa oleosin and and visualized using alkaline phosphatase. Expression of the thioredoxin-oleosin results in an additional band of 31.2 kDa. The results indicate that the thioredoxin antibodies are immunologically reactive with a band of the right predicted molecular weight (31.2 kDa), and the oleosin antibodies are also immunologically reactive with a band of the right predicted molecular weight for the fusion protein (31.2 kDa) in addition to a band corresponding to the native Arabidopsis oleosin (18.5 kDa). This indicates that thioredoxin-oleosin is expressed in Arabidopsis seeds and is correctly targeted to oilbodies.

[0349] Analysis of Seed Extracts from Plants Transformed with pSBS2520

[0350] Total seed extracts from plants transformed with pSBS2520 were loaded onto polyacrylamide gels and either stained with Coomassie brilliant blue or electroblotted onto PVDF membranes. The membranes were challenged with with a polyclonal antibody raised against Arabidopsis thioredoxin and visualized using alkaline phosphatase. The results indicated that the thioredoxin antibodies are immunologically reactive with a band of approximately the right predicted molecular weight (12 kDa). Untransformed seeds do not show a detectable thioredoxin band.

[0351] Analysis of Seed and Oil Body Extracts from Plants Transformed with pSBS2529

[0352] Total seed and oilbody protein extracts from plants transformed with pSBS2529 were loaded onto polyacrylamide gels and electroblotted onto PVDF membranes. The membranes were challenged with with a polyclonal antibody raised against Arabidopsis thioredoxin-reductase, or a monoclonal antibody raised against the Arabidopsis 18.5 kDa oleosin and and visualized using alkaline phosphatase. Expression of the thioredoxin-reductase-oleosin results in an additional band of 53.8 kDa. The results indicate that the thioredoxin-reductase antibodies are immunologically reactive with a band of the right predicted molecular weight for the fusion protein (53.8 kDa), the oleosin antibodies are also immunologically reactive with a band of the right predicted molecular weight (53.8 kDa) in addition to a band corresponding to the native Arabidopsis oleosin (18.5 kDa). This indicates that thioredoxin-reductase-oleosin is expressed in Arabidopsis seeds.

[0353] Analysis of Seed Extracts from Plants Transformed with pSBS2527

[0354] Total seed extracts from plants transformed with pSBS2527 were loaded onto polyacrylamide gels and electroblotted onto PVDF membranes. The membranes were challenged with with a polyclonal antibody raised against Arabidopsis thioredoxin-reductase and visualized using alkaline phosphatase. The thioredoxin-reductase antibodies are immunologically reactive with a band of approximately the right predicted molecular weight for the (35.3 kDa). Untransformed seeds do not show a detectable thioredoxin band.

[0355] Analysis of Seed Extracts from Plants Transformed with pSBS2531

[0356] A protein gel and immunoblot was prepared assaying the expression of oleosin-DMSR in Arabidopsis T2 seeds and correct targeting to Arabidopsis oilbodies. The expected molecular weight based on the deduced amino acid sequence is calculated to be 53,817 Da. In the oilbody extract of the transgenic oleosin-thioredoxin-reductase sample an extra band of approximately 54 kDa was observed. This band was confirmed to be oleosin-thioredoxin-reductase by immunoblotting. From the polyacrylamide gel it was observed that the expression of the oleosin-Thioredoxin-reductase is about double compared to the expression of the major 18.5 kDa Arabidopsis oleosin. This represents approximately 2-4% of total seed protein.

[0357] Analysis of Seed Extracts from Plants Transformed with pSBS2530

[0358] A protein gel and immunoblot was prepared assaying the expression of oleosin-M.lep TR/Trxh in Arabidopsis T2 seeds and the correct targeting to Arabidopsis oilbodies. The expected molecular weight based on the deduced amino acid sequence is calculated to be 67,550 Da. In the oilbody extract of the transgenic oleosin-M.lep TR/Trxh sample an extra band of approximately 68 kDa was observed. This band was confirmed to be oleosin-M.lep TR/Trxh by immunoblotting. From the polyacrylamide gel it was observed that the expression of the oleosin-M.lep TR/Trxh is similar to the expression of the major 18.5 kDa Arabidopsis oleosin. This represents approximately 1-2% of total seed protein.

[0359] Analysis of Seed Extracts from Plants Transformed with pSBS2542

[0360] Crude oil body extracts from pSBS2542 lines were prepared by grinding 100 μg of seed in 1 mL of 100 mM Tris buffer at pH 7.5. The samples were then centrifuged in order to isolate the oil body fraction. The oil body fraction was then loaded on an SDS polyacrylamide gel for expression analysis. A Coomassie stained gel revealed that the synthetic fusion accumulated to high levels in crude oil body extracts from 3 of the 4 lines tested. It was estimated that the fusion protein represented approximately 2-5% of total seed protein. Furthermore, western blots utilizing either anti-thioredoxin or anti-thioredoxin-reductase antibodies confirmed that the over expressed 70 kDa protein was indeed oleosin-thioredoxin-reductase-linker-thioredoxin.

### EXAMPLE 4

[0361] Biological Activity of Thioredoxin and Thioredoxin-Reductase Transformants

[0362] Initial Reduction Assays:

[0363] DTNB Assay

[0364] The activity of the thioredoxin and thioredioxin reductase was determined using a colorimetric DTNB [5,5′-dithiolbis (2-nitrobenzoic acid)] assay. The assay was performed in a 700 μL reaction volume containing 100 mM Tris-Cl pH 8.0, 5 mM EDTA, 200 μM DTNB [5,5′-dithiolbis (2-nitrobenzoic acid)] and 200 μM NADPH. If thioredoxin-reductase and thioredoxin are added, NADPH will reduce the thioredoxin-reductase, which will then reduce thioredoxin, which will, in turn, reduce DTNB (see equations below).

NADPH₂+thioredoxin-reductaseₒₓ→thioredoxin-reductase_{red}+NADP⁺

thioredoxin-reductase_{red}+thioredoxinₒₓ→thioredoxin_{red}+thioredoxin-reductaseₒₓ

thioredoxin_{red}+DTNBₒₓ→2(2-nitro-5-mercaptobenzoic acid)+thioredoxinₒₓ

[0365] The formation of the yellow product was monitored by measuring the OD₄₁₂ in a spectrophotometer after a set period of time (usually 0.5-2 hours). The results of initial activity assays are shown in the bar graph in FIG. 4 and described below.

[0366] Initially, 100 μg of total seed proteins were added from each of the Arabidopsis transgenic lines, pSBS2520 (cytosolic thioredoxin) and pSBS2527 (cytosolic thioredoxin-reductase), which corresponds to approximately 1 μg of cytosolic thioredoxin and thioredoxin-reductase used in the assay. In this case, the amount of DTNB reduced was comparable to the reduction caused by 1 μg each of E. coli thioredoxin and thioredoxin-reductase. In these plant seed samples, background readings were very low when only one of the 2 extracts (either cytosolic thioredoxin or cytosolic thioredoxin-reductase; FIG. 4, bars 3 and 6, respectively) was added to the reaction, along with wild type oil bodies.

[0367] Analysis with oil body fractions from transgenic seeds revealed that Arabidopsis thioredoxin and thioredoxin-reductase were substantially less active when fused to oleosins on oil bodies. Approximately 300 μg of crude, unwashed oil-body-protein was used in the assay (which corresponds to 10-30 μg of thioredoxin-oleosin (pSBS 2521; FIG. 4, bar 2), oleosin-thioredoxin (pSBS 2510, FIG. 4, bar 1), thioredoxin-reductase-oleosin (pSBS 2529, FIG. 4, bar 5), or oleosin-thioredoxin-reductase (PSBS 2531, FIG. 4, bar 4). The oil-body-proteins were tested in conjunction with 100 μg of total seed protein containing approximately 1 μg of cytosolic thioredoxin (pSBS 2520) or thioredoxin-reductase (pSBS 2527).

[0368] In such assays, pSBS2529 (thioredoxin-reductase-oleosin) and pSBS2531 (oleosin-thioredoxin-reductase) do contain reductase activity when combined with cytosolic thioredoxin from pSBS2520 (see FIG. 4, bars 7 and 8, respectively). Experiments estimated that the reductase activity of oleosin-thioredoxin-reductase was about 10-15% that of the cytosolic thioredoxin-reductase. The addition of tween at a final concentration of 0.4% could enhance this activity 2 or 3 fold. Interestingly, oleosin-thioredoxin-reductase (pSBS 2531) appears to be capable of reducing DTNB in the absence of added thioredoxin, although added thioredoxin causes significantly more DTNB reduction (see FIG. 4; compare bar 4 W.T.+oleosin-thioredoxin-reductase to bar 7 thioredoxin+oleosin-thioredoxin-reductase). Experiments with pSBS2521 (thioredoxin-oleosin) or pSBS2510 (oleosin-thioredoxin) combined with cytosolic thioredoxin-reductase from pSBS2527 (see FIG. 4, bars 10 and 11, respectively) indicate that thioredoxin activity of these fusions is undetectable at these concentrations.

[0369] Oil bodies from the transgenic Arabidopsis line, pSBS2530 (oleosin-M.lep TR/Trxh) contain significant thioredoxin/thioredoxin-reductase activity (see FIG. 4, bar 12). One hundred micrograms of crude oilbody protein for pSBS2530 was tested (corresponding to approximately 5 μg of oleosin-M.lep TR/trxh fusion) in the assay. Based on the assay, it was estimated that this fusion is about 25-40% as active as cytosolic Arabidopsis thioredoxin and thioredoxin-reductase (FIG. 4, bar 9) when comparing specific activity.

[0370] Insulin Reduction Assay

[0371] The results from the DTNB assays were confirmed with insulin reduction assays. This assay contained insulin at a final concentration of 1 mg/mL in 100 mM KH₂PO₄ pH 7.0+5 mM EDTA. In the presence of NADPH (500 μM), thioredoxin, and thioredoxin-reductase, insulin is reduced and precipitates from the solution. Normally, insulin reduction is followed by measuring turbidity at OD 650. Alternatively, one can measure the conversion of NADPH₂ to NADP⁺ by monitoring the decrease in absorbance at 340 nm.

[0372] Both of the assays are difficult to measure when oil bodies are present, due to interference with the spectrophotometer readings. However, qualitative data could be obtained by centrifuging the tubes after a set period of time, and determining if an insulin pellet was present (oil bodies float to the top, while the insulin precipitate pellets out). Alternatively, samples could be filtered after a set period of time, and the change in absorbance at 340 nm could be measured. As mentioned previously, the results of the insulin reduction assays agreed with those of the DTNB assay, with the exception of the observation that pSBS2531 (oleosin-thioredoxin-reductase) only reduced insulin in the presence of free thioredoxin from pSBS2520.

[0373] Assays on Seeds from Arabidopsis Crosses that Co-Express Oleosin-Thioredoxin and Oleosin-Thioredoxin-Reductase.

[0374] Based upon initial DTNB and insulin reduction assays, it was apparent that mixing oil bodies from oleosin <−> thioredoxin and oleosin <−> thioredoxin-reductase transgenic seeds resulted in very limited reducing activity (Note: the <−> indicates both configurations of oleosin fusions; ie. oleosin <−> thioredoxin would represent oleosin-thioredoxin and thioredoxin-oleosin fusions).

[0375] To determine whether having oleosin <−> thioredoxin and oleosin <−> thioredoxin-reductase proteins present on the same oil body would have a positive effect on the reducing activity of these proteins, crosses were set up to generate double transgenic Arabidopsis lines. The crosses are illustrated in Table 2.

TABLE 2

| | | | Confirmed |
|---|---|---|---|
| | | | double |
| | | | transgenic lines |
| | | | (PCR and |
| Male | | Female | Western Blot) |
| oleo-thioredoxin | X | oleo-thioredoxin- | 4 |
| | | reductase | |
| oleo-thioredoxin | X | thioredoxin-reductase- | 1 |
| | | oleo | |
| thioredoxin-oleo | X | oleo-thioredoxin- | 0 |
| | | reductase | |
| thioredoxin-oleo | X | thioredoxin-reductase- | 4 |
| | | oleo | |
| oleo-thioredoxin- | X | oleo-thioredoxin | 2 |
| reductase | | | |
| oleo-thioredoxin- | X | thioredoxin-oleo | 0 |
| reductase | | | |
| thioredoxin- | X | oleo-thioredoxin | 7 |
| reductase-oleo | | | |
| thioredoxin- | X | thioredoxin-oleo | 0 |
| reductase-oleo | | | |

[0376] Seeds from Arabidopsis crosses were germinated on PPT plates and the seedlings were transferred to soil after approximately 2 weeks. PCR experiments on DNA isolated from the seedlings identified a number of plants which contain both an oleosin <−> thioredoxin and an oleosin <−> thioredoxin-reductase gene construct within their genome.

[0377] Seeds were harvested from these plants for expression and activity assays. Western blots were carried out to confirm expression of both oleosin <−> thioredoxin and oleosin <−> thioredoxin-reductase in the lines. DTNB and insulin reduction assays were also performed to compare activity between single transgenic parent lines and the double transgenic offspring and results are summarized in Table 3. Table 3 summarizes DTNB reducing activity of various transgenic lines. The last 2 rows compare mixing oil bodies from single transgenic parent lines to using oil bodies from double transgenic offspring. Relative activity for the E. coli thioredoxin and thioredoxin mixture is set at 100 percent.

TABLE 3

| | Relative Activity |
|---|---|
| Source Material | (%) |
| E. coli trx + NTR | 100 |
| Arabidopsis “free” thioredoxin + | 100 |
| thioredoxin-reductase | |
| (pSBS2520 + pSBS2527) | |
| oleosin- M. lep TR/Trxh | ˜30 |
| (pSBS2530) | |
| Oleosin <-> thioredoxin-reductase + | ˜3 |
| oleosin <-> thioredoxin (mixing oil | |
| bodies from single-transgenic parents) | |
| Oleosin <-> thioredoxin-reductase × | ˜50 |
| oleosin <-> thioredoxin | |
| (various double transgenic lines) | |

[0378] Based on DTNB and insulin reduction assays, it is evident that double transgenic plants co-expressing oleosin <−> thioredoxin and oleosin <−> thioredoxin-reductase on the same, single oil body contained significantly more reducing activity compared to mixing oil bodies from single transgenic oleosin <−> thioredoxin and oleosin <−> thioredoxin-reductase lines. It was additionally apparent that oil body extracts from co-expressing lines contained more reducing activity compared to line pSBS2530 (oleosin-M. lep TR/Trxh), which was previously identified as the line containing the highest reducing activity from oil bodies.

[0379] These results suggest that the creation of double transgenic lines (either through crossing or by co-transforming 2 expression constructs into plants) may represent one means by which we could solve our initial problem of not being able to generate reducing activity by mixing oil bodies from oleosin <−> thioredoxin and oleosin <−> thioredoxin-reductase single transgenic lines.

[0380] Assays on Seeds from Arabidopsis pSBS2542 Transgenic Lines that Express Oleosin-Thioredoxin-Reductase-Linker-Thioredoxin.

[0381] Oil body extracts from four pSBS2542 lines were tested for reducing activity in DTNB and insulin reduction assays, using standard protocols described previously. Again, oil body extracts containing the oleosin-thioredoxin-reductase-linker-thioredoxin protein possessed significant reducing activity. Based on such assays, it was revealed that the oleosin-thioredoxin-reductase-linker-thioredoxin synthetic fusion protein was more active than the oleosin-M. lep TR/Trxh fusion. Furthermore, oil bodies containing the oleosin-thioredoxin-reductase-linker-thioredoxin protein appeared to have more reducing activity compared to oil bodies from double transgenic lines that co-expressed oleosin <−> thioredoxin and oleosin <−> thioredoxin-reductase. The results comparing reducing activity for the various thioredoxin-reductase/thioredoxin constructs is summarized in Table 4. Table 4 summarizes DTNB reducing activity of various transgenic lines. The pSBS2542 line expressing oleosin-thioredoxin-reductase-linker-thioredoxin contains significant reducing activity, comparable to the “free” forms of Arabidopsis thioredoxin and thioredoxin-reductase and the equivalent E. coli proteins. Relative activity for the E. coli thioredoxin and thioredoxin mixture is set at 100 percent.

TABLE 4

| | Relative Activity |
|---|---|
| Source Material | (%) |
| E. coli trx + NTR | 100 |
| Arabidopsis “free” thioredoxin + thioredoxin- | 100 |
| reductase | |
| (pSBS2520 + pSBS2527) | |
| oleosin- M. lep TR/Trxh | ˜30 |
| (pSBS2530) | |
| Oleosin <-> thioredoxin-reductase + | ˜3 |
| oleosin <-> thioredoxin | |
| (mixing oil bodies from single-transgenic | |
| parents) | |
| Oleosin <-> thioredoxin-reductase × | ˜50 |
| oleosin <-> thioredoxin | |
| (various double transgenic lines) | |
| Oleosin-thioredoxin- | ˜75-100 |
| reductase-linker-thioredoxin | |
| (pSBS2542) | |

[0382] Reduction Assays Comparing the Utilization of NADH vs. NADPH as a Cofactor (Electron Donor) for the Thioredoxin-Reductase/Thioredoxin System.

[0383] DTNB and insulin reduction assays were conducted as described previously, except that NADH was substituted for NADPH as an electron donor in the system utilizing E. coli thioredoxin-reductase and thioredoxin. Thus, a comparison was conducted of the utilization of NADH versus NADPH as a cofactor for the E. coli thioredoxin-reductase/thioredoxin system. For the DTNB assay, the reaction mixture consisted of 400 μM DTNB, 10 μg/mL E. coli thioredoxin, and 10 μg/mL E. coli thioredoxin-reductase in 100 mM Tris-Cl buffer pH 8.0. Either NADH or NADPH was then added to the DTNB reaction as follows:

[0384] Reaction A. 200 μM NADPH (Sigma)

[0385] Reaction B. 800 μM NADH (Sigma)

[0386] Reaction C. 800 μM NADH (Roche)

[0387] Reaction D. (−) cofactor

[0388] Reaction E. 800 μM NADH (no TR or Trxh).

[0389] For the insulin reduction assay, the reaction mixture consisted of 1 mg/mL bovine pancreatic insulin, 20 μg/mL E. coli thioredoxin, and 20 μg/mL E. coli thioredoxin-reductase in 100 mM potassium phosphate buffer at pH 7.0. Either NADH or NADPH was then added to the reaction as follows:

[0390] Reaction A. 800 μM NADPH (Sigma)

[0391] Reaction B. 800 μM NADH (Sigma)

[0392] Reaction C. 800 μM NADH (Roche)

[0393] Reaction D. (−) cofactor

[0394] Reaction E. 2 mM NADH (no TR or Trxh).

[0395] The results indicate that NADH, purchased from either Sigma or Roche, could act as an electron donor in both the DTNB and insulin reduction assays. However, the rate of reduction was lower than the rate observed with NADPH as a cofactor. It was estimated that the rate of insulin reduction utilizing NADH as an electron donor was approximately 25-50% when compared to the maximum rate using NADPH. Furthermore, it was estimated that the rate of DTNB reduction utilizing NADH as an electron donor was approximately 5-10% of the maximum rate using NADPH. Similar results were observed using the oleosin-thioredoxin-reductase-linker thioredoxin fusion protein on Arabidopsis oil bodies instead of the E. coli thioredoxin-reductase and thioredoxin.

### EXAMPLE 5

[0396] Production of Multimeric Immunoglobulin Protein in Plant Seed Cells and Capture on Oil Bodies Using Protein A—Oleosin Fusion Proteins.

[0397] 1—Production of Multimeric Immunoglobulin Protein in Plant Seed Cells

[0398] For expression of multimeric-protein-complexes containing multimeric-immunoglobulin-complexes, the cDNA sequences encoding individual light and heavy chains can be isolated from; 1) cell lines expressing a particular antibody, such as clonal B cell lines, or a hybridoma cell line, or 2) may be a recombinant antibody, assembled by combining select light and heavy chain variable domains and available light and heavy chain constant domain sequences, respectively. Variable domains with specific binding properties may be isolated from screening populations of such sequences, usually in the form of a single-chain Fv phage display library.

[0399] Starting from known nucleic acid sequences and a source of light and heavy chains, the mature polypeptide coding sequences of each chain is isolated with a secretion signal sequence. The signal sequence can be the native antibody sequence or derived from a known secreted plant sequence (e.g. a PR sequence from Arabidopsis or tobacco). The addition of a plant secretion signal sequence to both light and heavy chain mature coding sequences is carried out by standard molecular biology techniques. PCR fusion is used routinely to make such modifications. Secretion signal sequences are included to target the light and heavy immunoglobulin polypeptides for secretion from the cell and further assembly of the two chains into a multimeric-immunoglobulin-complex. For expression in transgenic plant seeds, an expression cassette is assembled comprising: 1) a regulatory promoter sequence to provide expression in plant seeds, 2) the secretion signal—light chain sequence, and 3) a regulatory sequence to terminate transcription. A second expression cassette is assembled comprising: 1) a regulatory promoter sequence to provide expression in plant seeds, 2) the secretion signal—heavy chain sequence, and 3) a regulatory sequence to terminate transcription. Each of the antibody chain expression cassettes is cloned individually into an Agrobacterium plant transformation vector or is combined into a single transformation vector with both expression cassettes. In both cases, the expression cassettes are cloned into plant transformation vectors, between the left and right delineating border sequences, and adjacent to a plant selectable marker cassette. Each plant transformation vector is transformed into Agrobacterium. The resulting Agrobacterium strains are used to infect plant tissues. Transgenic plant material is regenerated and viable transgenic plants are selected. When individual transformation vectors are used, the transgenic plant lines that are produced, expressing either light or heavy chain sequences, are crossed to generate a single plant line expressing both chains in the same plant cell. When a single transformation vector, containing both light and heavy expression cassettes, is used, the initial transgenic plant line produces both light and heavy chain sequences in the same plant cell.

[0400] 2—Production of Transgenic Oil Bodies which Display Protein A for the Capture of Immunoglobulins

[0401] To capture and display immunoglobulin protein on oil bodies, oil bodies are engineered to display an immunoglobulin binding protein. In this example, the well-known antibody-binding domains from Protein A are used. Based on the known sequence for Protein A from Staphylococcus aureus, PCR primers are designed to isolate the five consecutive Ig-binding domains from the bacterial Protein A sequence. Primers are designed to allow cloning of the Protein A sequence as either an N-terminal or C-terminal fusion to an oleosin sequence for targeting to oil bodies. The sequence that encodes an in-frame translational fusion between Protein A and oleosin is cloned into a plant expression cassette for seed-specific expression. The final cassette consists of a regulatory promoter sequence that provides expression in seeds, the Protein A—oleosin fusion sequence, and a regulatory sequence to terminate transcription. The Protein A—oleosin expression cassette is cloned into a plant transformation vector compatible with Agrobacterium—mediated plant transformation. The transformation vector comprises left and right border sequences flanking the Protein A—oleosin expression cassette and an adjacent plant selectable marker cassette. The Agrobacterium strain containing this vector is used to infect plant tissues and subsequent regeneration and selection from transgenic plant material to create transgenic plants.

[0402] 3—Capture and Display of Multimeric-Immunoglobulins on Oil Bodies Displaying Protein A

[0403] Having produced light and heavy chain multimeric immunoglobulin complexes in one transgenic plant line and the display of Protein A on oil bodies through the oil body targeting of a Protein A—oleosin fusion protein in a second plant line, at least two embodiments can be used to capture the immunoglobulin complex on the Protein A oil bodies. In the first embodiment, transgenic seed from both the immunoglobulin and the Protein A—oleosin expression lines is combined in an optimum ratio and then ground together such that the disrupted material from both seed lines would be combined in the same extract. The combined seed extracts are mixed and/or incubated under conditions that allow maximum recovery of the immunoglobulin by Protein A. The oil body fraction is separated using standard phase separation techniques (e.g. centrifugation). The recovered oil body fraction contains both native oil bodies, from the immunoglobulin expression line, and transgenic Protein A oil bodies from the Protein A—oleosin expression line.

[0404] In a second embodiment, the plant lines expressing the immunoglobulin complex and the Protein A—oleosin fusion are crossed and individual plant lines expressing both components are identified and propagated. In this approach, the immunoglobulin complex and the Protein A—oleosin fusion are produced in different cellular compartments of the same plant seed cell. Seed from the double transgenic line is ground to disrupt the cellular material and mix the contents of all cellular compartments, including combining the immunoglobulin in the extracellular compartment and the Protein A—oleosin on the oil body in the cytosolic compartment. The material is mixed and/or incubated under conditions to allow maximum recovery of the immunoglobulin by Protein A, and the oil body fraction is separated by phase separation techniques. The recovered oil body fraction contains the displayed Protein A and the capture immunoglobulin complex.

### EXAMPLE 6

[0405] Production of Assembled Multimeric-Immunoglobulin-Complexess as Fusions with Oil Body Targeting Domains.

[0406] Individual polypeptides are produced as a fusion protein with oil body targeting sequences (e.g. oleosin) for display on oil bodies. It has been found that the individual subunits of naturally associating heterodimeric proteins can be co-produced as individual oleosin fusions and still associate as an active heterodimer on the surface of the oil body. In this example, the heterodimer is the light and heavy chain subunits, or derived portions thereof, of an immunoglobulin complex.

[0407] Production of an Immunoglobulin Fab Complex on Oil Bodies.

[0408] The mature light chain sequence, lacking the secretion signal sequence, is attached as an in-frame N-terminal fusion to an oleosin sequence. This fusion sequence is assembled into a seed-specific expression cassette consisting of a seed-specific promoter sequence, the light chain—oleosin fusion sequence, and a transcriptional terminator sequence. The expression cassette is inserted between the left and right border markers, adjacent to a plant selectable marker cassette, of a transformation vector. The transformation vector, in Agrobacterium, is used to infect plants and generate transgenic plants.

[0409] An equivalent construct for the heavy chain subunit, comprising the variable and constant heavy chain domains, is also attached as an in-frame fusion to oleosin and assembled into an expression cassette for seed-specific expression. The expression cassette can be a part of a separate transformation vector for the generation of a separate transgenic line, or the heavy chain expression cassette can be combined together with the light chain cassette into a single transformation vector. If light and heavy chain expression cassettes are transformed into plants on separate transformation vectors, the individual plant lines are crossed to create a single line expressing both heterodimer subunit—oleosin fusions in the same plant cell. Seed from the double transgenic line, or a single transgenic line generated from the dual expression vector, is extracted to isolate oil bodies. The seed material is ground to release the cellular contents and oil bodies are isolated by phase separation. The targeting of both light and heavy chain sequence to oil bodies, as oleosin fusions, allows the association of the immunoglobulin complex on the surface of the oil body.

[0410] Similar configurations, using the entire heavy chain sequence in combination with the entire light chain sequence, or using the variable domains from both the light and heavy chain sequences, are constructed to assemble different types of heteromultimeric-immunoglobulin-complexes (e.g., heterodimers) on the surface of oil bodies.

[0411] The present invention should therefore not be seen as limited to the particular embodiments described herein, but rather, it should be understood that the present invention has wide applicability with respect to protein expression generally. Since modifications will be apparent to those of skill in this art, it is intended that this invention be limited only by the scope of the appended claims.

### SUMMARY OF SEQUENCES

[0412] SEQ ID NOs:1-4 set forth primers which were synthesized for the isolation of the thioredoxin h (Trxh) and thioredoxin reductase genes from Arabidopsis, as described in Example 1.

[0413] SEQ ID NOs:5-7 set forth primers which were designed to code for a specific linker peptide between thioredoxin reductase and thioredoxin proteins, as described in Exmaple 2.

[0414] SEQ ID NOs:8, 10 and 11 set forth the nucleotide sequence and the deduced amino acid sequence of the NADPH thioredoxin reductase sequence isolated herein as described in Example 1.

[0415] SEQ ID NOs:9 and 11, respectivley, set forth the nucleotide sequence of the published NADPH thioredoxin reductase sequence (ATTHIREDB) and the deduced amino acid sequence.

[0416] SEQ ID NO:12 sets forth the deduced amino acid sequence of the published NADPH thioredoxin reductase sequence.

[0417] SEQ ID NO:13 sets forth the deduced amino acid sequence of the NADPH reductase sequence isolated in this report.

[0418] SEQ ID NOs:14 and 15 set forth the nucleotide sequence of the phaseolin promoter-Arabidopsis Trxh-phaseolin terminator sequence described in Example 2, and the deduced amino acid sequence. The Trxh coding sequence and its deduced amino acid sequence is indicated. The phaseolin promoter corresponds to nucleotide 6-1554, and the phaseolin terminator corresponds to nucleotide sequence 1905-3124. The promoter was furnished with a PstI site (nt 1-6) and the terminator was furnished with a HindIII site (nt 1898-1903) and a KpnI site (nt 3124-3129) to facilitate cloning.

[0419] SEQ ID NOs:16, 17 and 18 set forth the nucleotide sequence of the phaseolin promoter-oleosin Trxh-phaseolin terminator sequence described in Example 2, and the deduced amino acid sequences. The oleosin-Trxh coding sequence and the deduced amino acid sequences are indicated in SEQ ID NO:16. As in SEQ ID NO:14, the phaseolin promoter corresponds to nucleotide 6-1554. The sequence encoding oleosin corresponds to nt 1555-2313, the intron in this sequence (nt 1908-2147) is indicated in italics. The Trxh coding sequence corresponds to nt 2314-2658. The phaseolin terminator corresponds to nucleotide sequence 2664-3884.

[0420] SEQ ID NO:19, 20 and 21 set forth the nucleotide sequence of the phaseolin promoter-Trxh oleosin-phaseolin terminator sequence as described in Example 2, and the deduced amino acid sequences. The Trxh oleosin-coding sequence and its deduced amino acid sequences are indicated in SEQ ID NO:19. As in SEQ ID NOs:14 and 16, the phaseolin promoter corresponds to nucleotide 6-1554. The Trxh coding sequence corresponds to nt 1555-1896. The sequence encoding oleosin corresponds to nt 1897-2658, the intron in this sequence (nt 2250-2489) is indicated in italics. The phaseolin terminator corresponds to nucleotide sequence 2664-3884.

[0421] SEQ ID NO:22 and 23 set forth the nucleotide sequence of the phaseolin promoter-thioredoxin-reductase-phaseolin terminator sequence as described in Example 2, and the deduced amino acid sequence. The thioredoxin-reductase coding sequence and its deduced amino acid sequence is indicated in SEQ ID NO:22. The phaseolin promoter corresponds to nucleotide 6-1554. The thioredoxin-reductase coding sequence corresponds to nt 1555-2556 and the deduced amino acid is set forth in SEQ ID NO:23. The phaseolin terminator corresponds to nucleotide sequence 2563-3782.

[0422] SEQ ID NOs:24, 25 and 26 show the nucleotide sequence of the phaseolin promoter-oleosin thioredoxin-reductase-phaseolin terminator sequence as described in Example 2, and the deduced amino acid sequences. The oleosin-thioredoxin-reductase coding sequence and its deduced amino acid sequence is indicated. The phaseolin promoter corresponds to nucleotide 6-1554. The sequence encoding oleosin corresponds to nt 1555-2313, the intron in this sequence (nt 1980-2147) is indicated in italics. The thioredoxin-reductase coding sequence corresponds to nt 2314-3315. The phaseolin terminator corresponds to nucleotide sequence 3321-4540.

[0423] SEQ ID NOs:27, 28 and 29 show the nucleotide sequence of the phaseolin promoter-thioredoxin-reductase oleosin-phaseolin terminator sequence as described in Example 2, and the deduced amino acid sequences. The thioredoxin-reductase coding sequence and its deduced amino acid sequence is indicated. The phaseolin promoter corresponds to nucleotide 6-1554. The thioredoxin-reductase coding sequence corresponds to nt 1555-2553. The sequence encoding oleosin corresponds to nt 2554-3315, the intron in this sequence (nt 2751-3146) is indicated in italics. The phaseolin terminator corresponds to nucleotide sequence 3321-4540.

[0424] SEQ ID NO:30, 31 and 32 show the sequence of the phaseolin promoter-oleosin-Mlep thioredoxin-reductase/thioredoxin-phaseolin terminator sequence as described in Example 2, and the deduced amino acid sequences. The oleosin-Mlep thioredoxin-reductase/thioredoxin coding sequence and its deduced amino acid sequence is indicated. The phaseolin promoter corresponds to nucleotide 6-1554. The sequence encoding oleosin corresponds to nt 1555-2313, the intron in this sequence (nt) is indicated in italics. The Mlep thioredoxin-reductase/thioredoxin coding sequence corresponds to nt 2314-3690. The phaseolin terminator corresponds to nucleotide sequence 3698-4917.

[0425] SEQ ID NOs:33, 34 and 35 set forth the nucleotide sequence of the phaseolin promoter-oleosin-thioredoxin-reductase-linker-thioredoxin-phaseolin terminator region of pSBS2542, and the deduced amino acid sequences. The deduced amino acid sequence of oleosin-thioredoxin-reductase-linker-thioredoxin is also shown in SEQ ID NO:33. Amino acids representing oleosin are set forth at positions 1-173, those amino acids representing thioredoxin-reductase are set forth at positions 174-501, those amino acids representing the linker or spacer peptide are set forth at positions 501-524, and those representing thioredoxin are set forth at positions 525-636.

[0426] SEQ ID NOs:38 and 39 set forth the nucleotide sequence of Arabidopsis Thaliana Thioredoxin h (Trx h 1) and the encoded protein, respectively.

[0427] SEQ ID NOs:40 and 41 set forth the nucleotide sequence of Arabidopsis Thaliana Thioredoxin Reductase (NTR1) and the encoded protein, respectively.

[0428] SEQ ID NOs:42 and 43 set forth the nucleotide sequence of E. Coli Thioredoxin (TrxA) and the encoded protein, respectively.

[0429] SEQ ID NOs:44 and 45, set forth the nucleotide sequence of E. Coli Thioredoxin Reductase and the encoded protein, respectively.

[0430] SEQ ID NOs:46 and 47 set forth the nucleotide sequence of Human Thioredoxin and the encoded protein, respectively.

[0431] SEQ ID NOs:48 and 49, set forth the nucleotide sequence of Human Thioredoxin Reducatase and the encoded protein, respectively.

[0432] SEQ ID NOs:50 and 51, respsectively, set forth the nucleotide sequence of Mycobacterium leprae Thioredoxin-Thioredoxin Reducatase and the encoded protein, respectively.

[0433] SEQ ID NOs:52-313 are described in Table 5.

TABLE 5
EXAMPLES OF REDOX PROTEINS

| | |
|---|---|
| SEQ. ID | SWISS PROTEIN IDENTIFIED |
| NO. | (in parenthesis) |

PLANT THIOREDOXINS

Thioredoxin f-type

| | |
|---|---|
| 52 | (Q9XFH8) Thioredoxin F-type 1, chloroplast precursor |
| | (TRX-F1). - Arabidopsis thaliana (Mouse-ear cress) |
| 53 | (Q9XFH9) Thioredoxin F-type 2, chloroplast precursor |
| | (TRX-F2). {GENE: AT5G16400 OR MQK4.13} - |
| | Arabidopsis thaliana (Mouse-ear cress) |
| 54 | (O48897) Thioredoxin F-type, chloroplast precursor (TRX- |
| | F). {GENE: TRXF} - Brassica napus (Rape) |
| 55 | (O81332) Thioredoxin F-type, chloroplast precursor (TRX- |
| | F). - Mesembryanthemum crystallinum (Common ice |
| | plant) |
| 56 | (P29450) Thioredoxin F-type, chloroplast precursor (TRX- |
| | F). - Pisum sativum (Garden pea) |
| 57 | (P09856) Thioredoxin F-type, chloroplast precursor (TRX- |
| | F). - Spinicia oleracea (Spinach) |

Thioredoxin m-type

| | |
|---|---|
| 58 | (P06544) Thioredoxin 1 (TRX-1) (Thioredoxin M). {GENE: |
| | TRXA} - Anabaena sp. (strain PCC 7119) |
| 59 | (O48737) Thioredoxin M-type 1, chloroplast precursor |
| | (TRX-M1). {GENE: AT1G03680 OR F21B7_7 OR |
| | F21B7.28} - Arabidopsis thaliana (Mouse-ear cress) |
| 60 | (Q9SEU8) Thioredoxin M-type 2, chloroplast precursor |
| | (TRX-M2). {GENE: AT4G03520 OR F9H3.15 OR |
| | T5L23.1} - Arabidopsis thaliana (Mouse-ear cress) |
| 61 | (Q9SEU7) Thioredoxin M-type 3, chloroplast precursor |
| | (TRX-M3). {GENE: AT2G15570 OR F9O13.12} - |
| | Arabidopsis thaliana (Mouse-ear cress) |
| 62 | (Q9SEU6) Thioredoxin M-type 4, chloroplast precursor |
| | (TRX-M4). - Arabidopsis thaliana (Mouse-ear cress) |
| 63 | (Q9XGS0) Thioredoxin M-type, chloroplast precursor |
| | (TRX-M). - Brassica napus (Rape) |
| 64 | (P23400) Thioredoxin M-type, chloroplast precursor |
| | (TRX-M) (Thioredoxin CH2). {GENE: TRXM} - |
| | Chlamydomonas reinhardtii |
| 65 | (Q41864) Thioredoxin M-type, chloroplast precursor |
| | (TRX-M). {GENE: TRM1} - Zea mays (Maize) |
| 66 | (Q9ZP20) Thioredoxin M-type, chloroplast precursor |
| | (TRX-M). - Oryza sativa (Rice) |
| 67 | (P48384) Thioredoxin M-type, chloroplast precursor |
| | (TRX-M). - Pisum sativum (Garden pea) |
| 68 | (P07591) Thioredoxin M-type, chloroplast precursor |
| | (TRX-M). - Spinicia oleracea (Spinach) |
| 69 | (Q9ZP21) Thioredoxin M-type, chloroplast precursor |
| | (TRX-M). - Triticum aestivum (Wheat) |
| 70 | (P12243) Thioredoxin 1 (TRX-1) (Thioredoxin M). {GENE: |
| | TRXA OR TRXM} - Synechococcus sp. (strain PCC 7942) |
| | (Anacystis nidulans R2) |
| 71 | (P37395) Thioredoxin. {GENE: TRXA OR TRX} - |
| | Cyanidium caldarium [Chloroplast] |
| 72 | (O22022) Thioredoxin. {GENE: TRXA OR TRXM} - |
| | Cyanidioschyzon merolae [Chloroplast] |
| 73 | (P50338) Thioredoxin. {GENE: TRXA} - Griffithsia |
| | pacifica [Chloroplast] |
| 74 | (P50254) Thioredoxin. {GENE: TRXA} - Porphyra |
| | yezoensis [Chloroplast] |
| 75 | (P51225) Thioredoxin. {GENE: TRXA} - Porphyra |
| | purpurea [Chloroplast] |

Thioredoxin h-type

| | |
|---|---|
| 76 | (P29448) Thioredoxin H-type 1 (TRX-H-1). {GENE: TRX1 |
| | OR AT3G51030 OR F24M12.70} - Arabidopsis thaliana |
| | (Mouse-ear cress) |
| 77 | (P20857) Thioredoxin 2 (TRX-2). {GENE: TRXB} - |
| | Anabaena sp. (strain PCC 7120) |
| 78 | (Q42388) Thioredoxin H-type 1 (TRX-H-1) (Pollen coat |
| | protein). {GENE: THL-1 OR BOPC17} - Brassica napus |
| | (Rape), Brassica oleracea (Cauliflower) |
| 79 | (P29449) Thioredoxin H-type 1 (TRX-H1). - Nicotiana |
| | tabacum (Common tobacco) |
| 80 | (Q38879) Thioredoxin H-type 2 (TRX-H-2). {GENE: TRX2 |
| | OR AT5G39950 OR MYH19.14} - Arabidopsis thaliana |
| | (Mouse-ear cress) |
| 81 | (Q39362) Thioredoxin H-type 2 (TRX-H-2). {GENE: THL |
| | 2}- Brassica napus (Rape) |
| 82 | (Q07090) Thioredoxin H-type 2 (TRX-H2). - Nicotiana |
| | tabacum (Common tobacco) |
| 83 | (Q42403) Thioredoxin H-type 3 (TRX-H-3). {GENE: TRX3 |
| | OR AT5G42980 OR MBD2.18} - Arabidopsis thaliana |
| | (Mouse-ear cress) |
| 84 | (Q39239) Thioredoxin H-type 4 (TRX-H-4). {GENE: |
| | TRX4} - Arabidopsis thaliana (Mouse-ear cress) |
| 85 | (Q39241) Thioredoxin H-type 5 (TRX-H-5). {GENE: |
| | TRX5} - Arabidopsis thaliana (Mouse-ear cress) |
| 86 | (O64432) Thioredoxin H-type (TRX-H). {GENE: PEC-2} - |
| | Brassica rapa (Turnip) |
| 87 | (P80028) Thioredoxin H-type (TRX-H) (Thioredoxin CH1). |
| | {GENE: TRXH} - Chlamydomonas reinhardtii |
| 88 | (Q96419) Thioredoxin H-type (TRX-H). - Fagopyrum |
| | esculentum (Common buckwheat) |
| 89 | (Q42443) Thioredoxin H-type (TRX-H) (Phloem sap 13 |
| | kDa protein-1). - Oryza sativa (Rice) |
| 90 | (O65049) Thioredoxin H-type (TRX-H). {GENE: SBO9} - |
| | Picea mariana (Black spruce) |
| 91 | (Q43636) Thioredoxin H-type (TRX-H). - Ricinus |
| | communis (Castor bean) |
| 92 | (O64394) Thioredoxin H-type (TRX-H) (TrxTa). - Triticum |
| | aestivum (Wheat) |
| 93 | (P29429) Thioredoxin. - Emericella nidulans (Aspergillus |
| | nidulans) |

VIRUSES, BACTERIA AND FUNGI THIOREDOXINS

| | |
|---|---|
| 94 | (P80579) Thioredoxin (TRX). {GENE: TRXA} - |
| | Alicyclobacillus acidocaldarius (Bacillus acidocaldarius) |
| 95 | (O28137) Thioredoxin. {GENE: AF2145} - Archaeoglobus |
| | fulgidus |
| 96 | (P14949) Thioredoxin (TRX). {GENE: TRXA OR TRX} - |
| | Bacillus subtilis |
| 97 | (P00276) Thioredoxin. {GENE: NRDC} - Bacteriophage T4 |
| 98 | (O51088) Thioredoxin (TRX). {GENE: TRXA OR BB0061} |
| | - Borrelia burgdorferi (Lyme disease spirochete) |
| 99 | (P57653) Thioredoxin (TRX). {GENE: TRXA OR BU597} - |
| | Buchnera aphidicola (subsp. Acyrthosiphon pisum) |
| | (Acyrthosiphon pisum symbiotic bacterium) |
| 100 | (O51890) Thioredoxin (TRX). {GENE: TRXA} - Buchnera |
| | aphidicola (subsp. Schizaphis graminum) |
| 101 | (P10472) Thioredoxin (TRX). {GENE: TRXA} - Chlorobium |
| | limicola f.sp. thiosulfatophilum |
| 102 | (Q9PJK3) Thioredoxin (TRX). {GENE: TRXA OR TC0826} |
| | - Chlamydia muridarum |
| 103 | (Q9Z7P5) Thioredoxin (TRX). {GENE: TRXA OR CPN0659 |
| | OR CP0088} - Chlamydia pneumoniae (Chlamydophila |
| | pneumoniae) |
| 104 | (P52227) Thioredoxin (TRX). {GENE: TRXA} - Chlamydia |
| | psittaci (Chlamydophila psittaci) |
| 105 | (084544) Thioredoxin (TRX). {GENE: TRXA OR CT539} - |
| | Chlamydia trachomatis |
| 106 | (P00275) Thioredoxin C-1. - Corynebacterium nephridii |
| 107 | (P07887) Thioredoxin C-2. - Corynebacterium nephridii |
| 108 | (P52228) Thioredoxin C-3. - Corynebacterium nephridii |
| 109 | (P09857) Thioredoxin (TRX). {GENE: TRXA} - |
| | Chromatium vinosum |
| 110 | (P21609) Thioredoxin (TRX). {GENE: TRXA} - Clostridium |
| | litorale (Bacterium W6) |
| 111 | (P81108) Thioredoxin (TRX) (Fragment). {GENE: TRXA} - |
| | Clostridium sporogenes |
| 112 | (P81109) Thioredoxin (TRX) (Fragment). {GENE: TRXA} - |
| | Clostridium sticklandii |
| 113 | (Q9UWO2) Thioredoxin (Allergen Cop c 2). - Coprinus |
| | comatus (Shaggy mane) |
| 114 | (P29445) Thioredoxin 1. {GENE: TRXA OR TRX1} - |
| | Dictyostelium discoideum (Slime mold) |
| 115 | (P29446) Thioredoxin 2 (Fragment). {GENE: TRXB OR |
| | TRX2} - Dictyostelium discoideum (Slime mold) |
| 116 | (P29447) Thioredoxin 3. {GENE: TRXC OR TRX3} - |
| | Dictyostelium discoideum (Slime mold) |
| 117 | (P00274) Thioredoxin 1 (TRX1) (TRX). {GENE: TRXA OR |
| | TSNC OR FIPA OR B3781} - Escherichia coli, Salmonella |
| | typhimurium |
| 118 | (P52232) Thioredoxin-like protein SLR0233. {GENE: |
| | SLR0233} - Synechocystis sp. (strain PCC 6803) |
| 119 | (P33636) Thioredoxin 2 (Trx2). {GENE: TRXC OR B2582 |
| | OR Z3867 OR EC53448} - Escherichia coli, Escherichia |
| | coli O157:H7 |
| 120 | (P21610) Thioredoxin (TRX). {GENE: TRXA} - |
| | Eubacterium acidaminophilum |
| 121 | (P43785) Thioredoxin (TRX). {GENE: TRXA OR TRXM OR |
| | H10084} - Haemophilus influenzae |
| 122 | (P43787) Thioredoxin-like protein HI1115. {GENE: |
| | Hl111 5} - Haemophiius influenzae |
| 123 | (P56430) Thioredoxin (TRX). {GENE: TRXA OR HP0824 |
| | OR JHP0763} - Helicobacter pylori (Campylobacter |
| | pylori), Helicobacter pylori J99 (Campylobacter pylori |
| | J99) |
| 124 | (Q95386) Thioredoxin (EC 1.6.4.5) {GENE: TRXA} - |
| | Listeria monocytogenes |
| 125 | (Q57755) Thioredoxin. {GENE: TRX OR MJ0307} - |
| | Methanococous jannaschii |
| 126 | (P47370) Thioredoxin (TRX). {GENE: TRXA OR TRX OR |
| | MG124} - Mycoplasma genitalium |
| 127 | (P46843) Bifunctional thioredoxin-reductase/thioredoxin |
| | [Includes: Thioredoxin-reductase (EC 1.6.4.5) (TRXR); |
| | Thioredoxin]. {GENE: TRXB/A OR TRX OR ML2703} - |
| | Mycobacterium leprae |
| 128 | (P75512) Thioredoxin (TRX). {GENE: TRXA OR TRX OR |
| | MPN263 OR MP570} - Mycoplasma pneumoniae |
| 129 | (O30974) Thioredoxin (TRX). {GENE: TRXA} - |
| | Mycobacterium smegmatis |
| 130 | (P52229) Thioredoxin (TRX) (MPT46). {GENE: TRXA OR |
| | TRX OR TRXC OR RV3914 OR MT4033 OR MTVO28.05} |
| | - Mycobacterium tuberculosis |
| 131 | (P42115) Thioredoxin. {GENE: TRX} - Neurospora crassa |
| 132 | (P34723) Thioredoxin. {GENE: TRXA} - Penicillium |
| | chrysogenum |
| 133 | (Q9X2T1) Thioredoxin (TRX). {GENE: TRXA OR TRX OR |
| | PA5240} - Pseudomonas aeruginosa |
| 134 | (P10473) Thioredoxin (TRX). {GENE: TRXA} - |
| | Rhodospirillum rubrum |
| 135 | (P08058) Thioredoxin (TRX). {GENE: TRXA} - |
| | Rhodobacter sphaeroides (Rhodopseudomonas |
| | sphaeroides) |
| 136 | (Q9ZEE0) Thioredoxin (TRX). {GENE: TRXA OR RP002} |
| | - Rickettsia prowazekii |
| 137 | (P33791) Thioredoxin (TRX) (Fragment). {GENE: TRXA} - |
| | Streptomyces aureofaciens |
| 138 | (P52230) Thioredoxin (TRX). {GENE: TRXA OR |
| | SCH24.11C} - Streptomyces coelicolor |
| 139 | (Q05739) Thioredoxin (TRX). {GENE: TRXA} - |
| | Streptomyces clavuligerus |
| 140 | (P52231) Thioredoxin (TRX). {GENE: TRXA OR |
| | SLR0623} - Synechocystis sp. (strain PCC 6803) |
| 141 | (P73263) Thioredoxin-like protein SLR1139. {GENE: |
| | SLR1139} - Synechocystis sp. (strain PCC 6803) |
| 142 | (P52233) Thioredoxin (TRX). {GENE: TRXA} - |
| | Thiobacillus ferrooxidans |
| 143 | (P96132) Thioredoxin (TRX) (Fragment). {GENE: TRXA} - |
| | Thiocapsa roseopersicina |
| 144 | (P81110) Thioredoxin (TRX) (Fragment). {GENE: TRXA} - |
| | Tissierella creatinophila |
| 145 | (O83889) Thioredoxin (TRX). {GENE: TRXA OR TP0919} |
| | - Treponema pallidum |

ANIMAL THIOREDOXIN

| | |
|---|---|
| 146 | (O97680) Thioredoxin. {GENE: TXN} - Bos taurus |
| | (Bovine) |
| 147 | (Q95108) Thioredoxin, mitochondrial precursor (MT- |
| | TRX). {GENE: TXN2} - Bos taurus (Bovine) |
| 148 | (Q09433) Thioredoxin. {GENE: B0228.5} - |
| | Caenorhabditis elegans |
| 149 | (P99505) Thioredoxin (Fragment). {GENE: TXN} - Canis |
| | familiaris (Dog |
| 150 | (P08629) Thioredoxin. {GENE: TXN} - Gallus gallus |
| | (Chicken) |
| 151 | (P47938) Thioredoxin (Deadhead protein). {GENE: DHD |
| | OR CG4193} - Drosophila melanogaster (Fruit fly) |
| 152 | (P10599) Thioredoxin (ATL-derived factor) (ADF) |
| | (Surface associated sulphydryl protein) (SASP). {GENE: |
| | TXN OR TRDX OR TRX} - Homo sapiens (Human) |
| 153 | (Q99757) Thioredoxin, mitochondrial precursor (MT- |
| | TRX). {GENE: TXN2} - Homo sapiens (Human) |
| 154 | (P29451) Thioredoxin. {GENE: TXN} - Macaca mulatta |
| | (Rhesus macaque) |
| 155 | (P10639) Thioredoxin (ATL-derived factor) (ADF). {GENE: |
| | TXN} - Mus musculus (Mouse) |
| 156 | (P97493) Thioredoxin, mitochondrial precursor (MT-TRX). |
| | {GENE: TXN2} - Mus musculus (Mouse) |
| 157 | (P82460) Thioredoxin (Fragment). {GENE: TXN} - Sus |
| | scrofa (Pig) |
| 158 | (P08628) Thioredoxin. {GENE: TXN} - Oryctolagus |
| | cuniculus (Rabbit) |
| 159 | (P11232) Thioredoxin. {GENE: TXN} - Rattus norvegicus |
| | (Rat) |
| 160 | (P97615) Thioredoxin, mitochondrial precursor (MT-TRX). |
| | {GENE: TXN2 OR TRX2} - Rattus norvegicus (Rat) |
| 161 | (P50413) Thioredoxin. {GENE: TXN} - Ovis aries (Sheep) |

PLANTS THIOREDOXIN-LIKE PROTEINS

| | |
|---|---|
| 162 | (O23166) THIOL-DISULFIDE INTERCHANGE LIKE |
| | PROTEIN (THIOREDOXIN-LIKE PROTEIN) |
| | {GENE: C7A1O.160 OR AT4G37200 OR HCF164} - |
| | Arabidopsis thaliana (Mouse-ear cress) |
| 163 | (Q9C9Y6) Thioredoxin-like protein {GENE: F17O14.18} - |
| | Arabidopsis thaliana (Mouse-ear cress) |
| 164 | (Q9FYD5) Thioredoxin-like protein {GENE: F21E1_180} - |
| | Arabidopsis thaliana (Mouse-ear cress) |
| 165 | (Q38878) THIOREDOXIN-LIKE PROTEIN {GENE: TRX6 |
| | OR T7D17.3} - Arabidopsis thaliana (Mouse-ear cress) |
| 166 | (Q9LVI2) Thioredoxin-like protein - Arabidopsis thaliana |
| | (Mouse-ear cress) |
| 167 | (Q9SCN9) Thioredoxin-like protein {GENE: T4D2.150} - |
| | Arabidopsis thaliana (Mouse-ear cress) |
| 168 | (Q9SRD7) Thioredoxin-like protein, 49720-48645 |
| | {GENE: F28O16.13} - Arabidopsis thaliana (Mouse-ear |
| | cress) |
| 169 | (Q9SU84) THIOREDOXIN-LIKE PROTEIN |
| | {GENE: T16L4.180 OR AT4G29670} - Arabidopsis |
| | thaliana (Mouse-ear cress} |
| 170 | (Q9SWG6) Thioredoxin-like protein {GENE: TRX} - |
| | Hordeum bulbosum |
| 171 | (Q9SWG4) Thioredoxin-like protein {GENE: TRX} - Lolium |
| | perenne (Perennial ryegrass) |
| 172 | (Q9AS75) Thioredoxin-like protein {GENE: P0028E10.17} |
| | - Oryza sativa (Rice) |
| 173 | (O04002) CDSP32 protein (Chloroplast Drought-induced |
| | Stress Protein of 32kDa) - Solanum tuberosum (Potato) |
| 174 | (Q9SWG5) Thioredoxin-like protein {GENE: TRX} - Secale |
| | cereale (Rye) |
| 175 | (Q9SP36) Thioredoxin-like protein (Fragment) |
| | {GENE: TRX} - Secale cereale (Rye) |
| 176 | (Q9U515) Thioredoxin-like protein - Manduca sexta |
| | (Tobacco hawkmoth) (Tobacco hornworm) |

VIRUSES, BACTERIA AND FUNGI
THIOREDOXIN-LIKE PROTEINS

| | |
|---|---|
| 177 | (P43221) Thiol:disulfide interchange protein tipA |
| | (Cytochrome c biogenesis protein tlpA). {GENE: TLPA} - |
| | Bradyrhizobium japonicum |
| 178 | (P43787) Thioredoxin-like protein HI1115. {GENE: |
| | HI1115} - Haemophilus influenzae |
| 179 | (Q9GUP7) Thioredoxin-like protein {GENE: TRXLP} - |
| | Leishmania major |
| 180 | (Q9UVH0) Thioredoxin-like protein - Mortierella alpina |
| 181 | (P95355) Thioredoxin-like protein - Neisseria gonorrhoeae |
| 182 | (Q98G37) Thioredoxin-like protein {GENE: MLL3505} - |
| | Rhizobium loti (Mesorhizobium loti) |
| 183 | (P36893) Thiol:disulfide interchange protein helX |
| | precursor (Cytochrome c biogenesis protein helX). |
| | {GENE: HELX} - Rhodobacter capsulatus |
| | (Rhodopseudomonas capsulata) |
| 184 | (P52232) Thioredoxin-like protein SLR0233. {GENE: |
| | SLR0233} - Synechocystis sp. (strain PCC 6803) |
| 185 | (P73263) Thioredoxin-like protein SLR1139. {GENE: |
| | SLR1139} - Synechocystis sp. (strain PCC 6803) |
| 186 | (Q9USR1) Thioredoxin-like protein {GENE: SPBC577.08C} |
| | - Schizosaccharomyces pombe (Fission yeast) |
| 187 | (Q9R788) Thioredoxin {GENE: TPTRX} - Treponema |
| | pallidum |

ANIMALS THIOREDOXIN-LIKE PROTEINS

| | |
|---|---|
| 188 | (Q9UAV4) F46E10.9 PROTEIN (THIOREDOXIN-LIKE |
| | PROTEIN DPY-11) {GENE: F46E10.9 OR DPY-11} - |
| | Caenorhabditis elegans |
| 189 | (Q9N2K6) Thioredoxin-like protein (Y54E10A.3 protein) |
| | (Thioredoxin-like protein TXL) {GENE: TXL OR |
| | Y54E10A.3} - Caenorhabditis elegans |
| 190 | (Q9VRP3) THIOREDOXIN-LIKE PROTEIN TXL (CG5495 |
| | PROTEIN) {GENE: TXL OR CG5495} - Drosophila |
| | melanogaster (Fruit fly) |
| 191 | (O43396) Thioredoxin-like protein (32 kDa thioredoxin- |
| | related protein). {GENE: TXNL OR TRP32 OR TXL} - |
| | Homo sapiens (Human) |
| 192 | (O76003) Thioredoxin-like protein - Homo sapiens |
| | (Human) |
| 193 | (Q9S753) THIOREDOXIN-LIKE PROTEIN {GENE: TRX} - |
| | Phalaris coerulescens |
| 194 | (O77404) TRYPAREDOXIN - Trypanosoma brucei brucei |

PLANT THIOREDOXIN-REDUCTASES

| | |
|---|---|
| 195 | (Q39243) Thioredoxin-reductase 1 (EC 1.6.4.5) (NADPH- |
| | dependent thioredoxin-reductase 1) (NTR 1). {GENE: |
| | NTR1 OR AT4G35460 OR F15J1.30} - Arabidopsis |
| | thaliana (Mouse-ear cress) |
| 196 | (Q39242) Thioredoxin-reductase 2 (EC 1.6.4.5) (NADPH- |
| | dependent thioredoxin-reductase 2) (NTR 2). {GENE: |
| | NTR2 OR AT2G17420 OR F5J6.18} - Arabidopsis |
| | thaliana (Mouse-ear cress) |

VIRUSES, BACTERIA AND FUNGI
THIOREDOXIN-REDUCTASES

| | |
|---|---|
| 197 | (O66790) Thioredoxin-reductase (EC 1.6.4.5) |
| | (TRXR). {GENE: TRXB OR AQ_500} - Aquifex aeolicus |
| 198 | (P80880) Thioredoxin-reductase (EC 1.6.4.5) (TRXR) |
| | (General stress protein 35) (GSP35). {GENE: TRXB} - |
| | Bacillus subtilis |
| 199 | (P94284) Thioredoxin-reductase (EC 1.6.4.5) (TRXR). |
| | {GENE: TRXB OR BB0515} - Borrelia burgdorferi (Lyme |
| | disease spirochete) |
| 200 | (P57399) Thioredoxin-reductase (EC 1.6.4.5) (TRXR). |
| | {GENE: TRXB OR BU314} - Buchnera aphidicola (subsp. |
| | Acyrthosiphon pisum) (Acyrthosiphon pisum symbiotic |
| | bacterium) |
| 201 | (P81433) Thioredoxin-reductase (EC 1.6.4.5) (TRXR). |
| | {GENE: TRXB} - Buchnera aphidicola (subsp. Schizaphis |
| | graminum) |
| 202 | (Q9PKT7) Thioredoxin-reductase (EC 1.6.4.5) (TRXR). |
| | {GENE: TRXB OR TC0375} - Chlamydia muridarum |
| 203 | (Q9Z8M4) Thioredoxin-reductase (EC 1.6.4.5) (TRXR). |
| | {GENE: TRXB OR CPN0314 OR CP0444} - Chlamydia |
| | pneumoniae (Chlamydophila pneumoniae) |
| 204 | (084101) Thioredoxin-reductase (EC 1.6.4.5) (TRXR). |
| | {GENE: TRXB OR CT099} - Chlamydia trachomatis |
| 205 | (P52213) Thioredoxin-reductase (EC 1.6.4.5) (TRXR). |
| | {GENE: TRXB} - Clostridium litorale (Bacterium W6) |
| 206 | (P39916) Thioredoxin-reductase (EC 1.6.4.5) (TRXR). |
| | {GENE: TRXB} - Coxiella burnetii |
| 207 | (P09625) Thioredoxin-reductase (EC 1.6.4.5) (TRXR). |
| | {GENE: TRXB OR B0888 OR Z1232 OR ECS0973} - |
| | Escherichia coli, Escherichia coli O157:H7 |
| 208 | (P50971) Thioredoxin-reductase (EC 1.6.4.5) (TRXR). |
| | {GENE: TRXB} - Eubacterium acidaminophilum |
| 209 | (P43788) Thioredoxin-reductase (EC 1.6.4.5) (TRXR). |
| | {GENE: TRXB OR HIll 58} - Haemophiius influenzae |
| 210 | (Q9ZL18) Thioredoxin-reductase (EC 1.6.4.5) (TRXR). |
| | {GENE: TRXB OR JHP0764} - Helicobacter pylori J99 |
| | (Campylobacter pylori J99) |
| 211 | (P56431) Thioredoxin-reductase (EC 1.6.4.5) (TRXR). |
| | {GENE: TRXB OR HP0825} - Helicobacter pylori |
| | (Campylobacter pylori) |
| 212 | (O32823) Thioredoxin-reductase (EC 1.6.4.5) (TRXR). |
| | {GENE: TRXB OR LMO2478} - Listeria monocytogenes |
| 213 | (P47348) Thioredoxin-reductase (EC 1.6.4.5) (TRXR). |
| | {GENE: TRXB OR MG102} - Mycoplasma genitalium |
| 214 | (P46843) Bifunctional thioredoxin-reductase/thioredoxin |
| | [Includes: Thioredoxin-reductase (EC 1.6.4.5) (TRXR); |
| | Thioredoxin]. {GENE: TRXB/A OR TRX OR ML2703} - |
| | Mycobacterium leprae |
| 215 | (P75531) Thioredoxin-reductase (EC 1.6.4.5) (TRXR). |
| | {GENE: TRXB OR MPN240 OR MP591} - Mycoplasma |
| | pneumoniae |
| 216 | (O30973) Thioredoxin-reductase (EC 1.6.4.5) (TRXR). |
| | {GENE: TRXB} - Mycobacterium smegmatis |
| 217 | (P52214) Thioredoxin-reductase (EC 1.6.4.5) (TRXR) |
| | (TR). {GENE: TRXB OR RV3913 OR MT4032 OR |
| | MTV028.04} - Mycobacterium tuberculosis |
| 218 | (P51978) Thioredoxin-reductase (EC 1.6.4.5). {GENE: |
| | CYS-9} - Neurospora crassa |
| 219 | (P43496) Thioredoxin-reductase (EC 1.6.4.5). {GENE: |
| | TRXB} - Penicillium chrysogenum |
| 220 | (Q9ZD97) Thioredoxin-reduotase (EC 1.6.4.5) (TRXR). |
| | {GENE: TRXB OR RP445} - Rickettsia prowazekii |
| 221 | (Q92375) Thioredoxin-reductase (EC 1.6.4.5). {GENE: |
| | SPBC3F6.03} - Schizosacoharomyces pombe (Fission |
| | yeast) |
| 222 | (Q05741) Thioredoxin-reductase (EC 1.6.4.5) (TRXR). |
| | {GENE: TRXB} - Streptomyces clavuligerus |
| 223 | (P52215) Thioredoxin-reductase (EC 1.6.4.5) (TRXR). |
| | {GENE: TRXB OR SCH24.12} - Streptomyces coelicolor |
| 224 | (O83790) Thioredoxin-reductase (EC 1.6.4.5) (TRXR). |
| | {GENE: TRXB OR TP0814} - Treponema pallidum |
| 225 | (P80892) Thioredoxin-reductase (EC 1.6.4.5) (TRXR) |
| | (Fragment). {GENE: TRXB} - Vibrio fischeri |
| 226 | (P29509) Thioredoxin-reductase 1 (EC 1.6.4.5). {GENE: |
| | TRR1 OR YDR353W OR D9476.5} - Saccharomyces |
| | cerevisiae (Baker's yeast) |
| 227 | (P38816) Thioredoxin-reductase 2, mitochondrial |
| | precursor (EC 1.6.4.5). {GENE: TRR2 OR YHR106W} - |
| | Sacoharomyces cerevisiae (Baker's yeast) |

ANIMAL THIOREDOXIN-REDUCTASES

| | |
|---|---|
| 228 | (O62768) Thioredoxin-reductase (EC 1.6.4.5). {GENE: |
| | TXNRD1} - Bos taurus (Bovine) |
| 229 | (Q17745) Thioredoxin-reductase (EC 1.6.4.5). {GENE: |
| | C06G3.7} - Caenorhabditis elegans |
| 230 | (Q16881) Thioredoxin-reductase (EC 1.6.4.5). {GENE: |
| | TXNRD1} - Homo sapiens (Human) |
| 231 | (Q25861) Thioredoxin-reductase (EC 1.6.4.5) (TrxR). |
| | {GENE: TR OR GR} - Plasmodium falciparum (isolate FCH |
| | 5) |

Other thioredoxin-reductases

PLANTS THIOREDOXIN-REDUCTASES

| | |
|---|---|
| 232 | (O22229) Thioredoxin-reductase {GENE: AT2G41680} - |
| | Arabidopsis thaliana (Mouse-ear cress) |
| 233 | (Q39951) NADPH thioredoxin-reductase (Fragment) - |
| | Helianthus annuus (Common sunflower) |

VIRUSES, BACTERIA AND FUNGI
THIOREDOXIN-REDUCTASES

| | |
|---|---|
| 234 | (O28718) THioredoxin-reductase (TRXB) {GENE: AF1554} |
| | - Archaeoglobus fulgidus |
| 235 | (Q9K703) Thioredoxin-reductase (NADPH) (EC 1.6.4.5) |
| | {GENE: TRXB OR BH3571} - Bacillus halodurans |
| 236 | (Q9K7F3) Thioredoxin-reductase {GENE: BH3408} - |
| | Bacillus halodurans |
| 237 | (Q9KCZ0) Thioredoxin-reductase {GENE: BH1429} - |
| | Bacillus halodurans |
| 238 | (Q9KCZ1) Thioredoxin-reductase {GENE: BH1428} - |
| | Bacillus halodurans |
| 239 | (Q9PIY1) Thioredoxin-reductase (EC 1.6.4.5) |
| | {GENE: TRXB OR CJ0146} - Campylobacter jejuni |
| 240 | (Q9A4G3) Thioredoxin-reductase {GENE: CC2871} - |
| | Caulobacter crescentus |
| 241 | (Q97EM8) Thioredoxin-reductase {GENE: CAC3082} - |
| | Clostridium acetobutylicum |
| 242 | (Q97IU2) Thioredoxin-reductase {GENE: CAC1548} - |
| | Clostridium acetobutylicum |
| 243 | (Q9EV96) Thioredoxin-reductase {GENE: TRXB} - |
| | Clostridium sticklandii |
| 244 | (Q9RSY7) THioredoxin-reductase {GENE: DR1982} - |
| | Deinococcus radiodurans |
| 245 | (O30739) Thioredoxin-reductase (Fragment) - |
| | Enterococcus faecalis (Streptococcus faecalis) |
| 246 | (O54535) Thioredoxin-reductase {GENE: TRXB OR |
| | TRXB1_2 OR VNG6452G OR TRXB1_1 OR |
| | VNG6O74G} - Halobacterium sp. (strain NRC-1) |
| | [Plasmid pNRC100, and Plasmid pNRC200] |
| 247 | (P82854) Thioredoxin-reductase (EC 1.6.4.5) |
| | {GENE: TRXB2} - Halobacterium sp. (strain NRC-1) |
| 248 | (Q9HN08) Thioredoxin-reductase {GENE: TXRB3 OR |
| | VNG2310G} - Halobacterium sp. (strain NRC-1) |
| 249 | (O25779) THioredoxin-reductase (TRXB) {GENE: HP1164} |
| | - Helicobacter pylori (Campylobacter pylori) |
| 250 | (O86255) Thioredoxin-reductase {GENE: TRXB} - |
| | Klebsiella oxytoca |
| 251 | (Q9AEV9) Thioredoxin-reductase (Fragment) |
| | {GENE: TRXB} - Lactococcus lactis (subsp. lactis) |
| | (Streptococcus lactis) |
| 252 | (Q9CF34) Thioredoxin-reductase (EC 1.6.4.5) |
| | {GENE: TRXB2} - Lactococcus lactis (subsp. lactis) |
| | (Streptococcus lactis) |
| 253 | (Q9CH02) Thioredoxin-reductase (EC 1.6.4.5) |
| | {GENE: TRXB1} - Lactococcus lactis (subsp. lactis) |
| | (Streptococcus lactis) |
| 254 | (Q9ZFC8) Thioredoxin-reductase (Fragment) |
| | {GENE: TRXB} - Lactococcus lactis |
| 255 | (O32822) Hypothetical 39.7 kDa protein (Fragment) - |
| | Listeria monocytogenes |
| 256 | (O26804) THioredoxin-reductase {GENE: MTH708} - |
| | Methanothermobacter thermautotrophicus |
| 257 | (P94397) Homologue of thioredoxin-reductase of |
| | Mycoplama genitalium {GENE: YCGT} - Bacillus subtilis |
| 258 | (Q98PK9) THioredoxin-reductase (EC 1.6.4.5) |
| | {GENE: MYPU_7130} - Mycoplasma pulmonis |
| 259 | (Q9JU23) Thioredoxin-reductase (EC 1.6.4.5) |
| | {GENE: TRXB OR NMA1538} - Neisseria meningitidis |
| | (serogroup A) |
| 260 | (Q9JZ28) Thioredoxin-reductase {GENE: NMB1324} - |
| | Neisseria meningitidis (serogroup B) |
| 261 | (Q910M2) Thioredoxin-reductase 1 {GENE: TRXB1 OR |
| | PA2616} - Pseudomonas aeruginosa |
| 262 | (Q91592) Thioredoxin-reductase 2 {GENE: TRXB2 OR |
| | PA0849} - Pseudomonas aeruginosa |
| 263 | (Q9VOQ8) THioredoxin-reductase (TRXB) {GENE: TRXB |
| | OR PAB0500} - Pyrococcus abyssi |
| 264 | (Q9ZD33) THioredoxin-reductase (TRXB2) {GENE: RP514} |
| | - Rickettsia prowazekii |
| 265 | (O54079) Thioredoxin-reductase (EC 1.6.4.5) |
| | {GENE: TRXB} - Staphylococcus aureus |
| 266 | (Q9RIS2) Thioredoxin-reductase {GENE: TRXB OR |
| | TRXB2} - Streptomyces coelicolor |
| 267 | (Q9K4L6) Thioredoxin-reductase {GENE: SC5F8.08C} - |
| | Streptomyces coelicolor |
| 268 | (Q97PY2) Thioredoxin-reductase {GENE: SP1458} - |
| | Streptococcus pneumoniae |
| 269 | (Q9A0B5) Thioredoxin-reductase {GENE: SPY0850} - |
| | Streptococcus pyogenes |
| 270 | (Q97V69) Thioredoxin-reductase (trxB-2) (EC 1.6.4.5) |
| | {GENE: TRXB-2} - Sulfolobus solfataricus |
| 271 | (Q97W27) Thioredoxin-reductase (trxB-3) (EC 1.6.4.5) |
| | {GENE: TRXB-3} - Sulfolobus solfataricus |
| 272 | (Q97WJ5) Thioredoxin-reductase (trxB-1) (EC 1.6.4.5) |
| | {GENE: TRXB-1} - Sulfolobus solfataricus |
| 273 | (Q98159) Thioredoxin-reductase {GENE: MLL2552} - |
| | Rhizobium loti (Mesorhizobium loti) |
| 274 | (Q98M06) Thioredoxin-reductase {GENE: MLL0792} - |
| | Rhizobium loti (Mesorhizobium loti) |
| 275 | (Q9UR80) 35 kDa THioredoxin-reductase HOMOLOG |
| | (FRAGMENT) {GENE: TRR1 AND YDR353W} - |
| | Saccharomyces cerevisiae (Baker's yeast) |
| 276 | (Q9ZEH4) THIOREDOXIN {GENE: TRXA OR SA0992} - |
| | Staphylococcus aureus, Staphylococcus aureus subsp. |
| | aureus N315 |
| 277 | (Q9S1H1) Thioredoxin-reductase (Fragment) |
| | {GENE: TRXB} - Staphylococcus xylosus |
| 278 | (Q9HJI4) Thioredoxin-reductase {GENE: TA0984} - |
| | Thermoplasma acidophilum |
| 279 | (Q9WZX3) THioredoxin-reductase {GENE: TM0869} - |
| | Thermotoga maritima |
| 280 | (Q979K8) Thioredoxin-reductase {GENE: TVG1183005} - |
| | Thermoplasma volcanium |
| 281 | (Q9PR71) Thioredoxin-reductase {GENE: TRXB OR |
| | UU074} - Ureaplasma parvum (Ureaplasma urealyticum |
| | biotype 1) |
| 282 | (Q9KSS4) Thioredoxin-reductase {GENE: VC11821 - |
| | Vibrio cholerae |
| 283 | (Q9PDD1) Thioredoxin-reductase {GENE: XF1448} - |
| | Xylella fastidiosa |
| 284 | (Q9X5F7) Thioredoxin-reductase {GENE: TRXB1} - |
| | Zymomonas mobilis |

ANIMAL THIOREDOXIN-REDUCTASES

| | |
|---|---|
| 285 | (Q9GKW9) Thioredoxin-reductase 3 (Fragment) |
| | {GENE: TRXR3} - Bos taurus (Bovine) |
| 286 | (Q9N2I8) Thioredoxin-reductase (EC 1.6.4.5) - Bos taurus |
| | (Bovine) |
| 287 | (Q9N2K1) Thioredoxin-reductase homolog - |
| | Caenorhabditis elegans |
| 288 | (Q9NJH3) Thioredoxin-reductase - Caenorhabditis |
| | elegans |
| 289 | (Q9VNT5) CG11401 PROTEIN (THioredoxin-reductase 2) |
| | {GENE: TRXR-2 OR CG11401} - Drosophila melanogaster |
| | (Fruit fly) |
| 290 | (O95840) Thioredoxin-reductase - Homo sapiens (Human) |
| 291 | (Q9UES8) Thioredoxin-reductase GRIM-12 - Homo |
| | sapiens (Human) |
| 292 | (Q9UH79) Thioredoxin-reductase {GENE: TR} - Homo |
| | sapiens (Human) |
| 293 | (Q9UQU8) Thioredoxin-reductase - Homo sapiens |
| | (Human) |
| 294 | (Q9NNW6) Thioredoxin-reductase TR2 (Fragment) - |
| | Homo sapiens (Human) |
| 295 | (Q9NNW7) Thioredoxin-reductase TR3 - Homo sapiens |
| | (Human) |
| 296 | (Q9P101) Thioredoxin-reductase 3 (Fragment) |
| | {GENE: TRXR3} - Homo sapiens (Human) |
| 297 | (Q9P2Y0) Thioredoxin-reductase II beta (EC 1.6.4.5) - |
| | Homo sapiens (Human) |
| 298 | (Q9H2Z5) Mitochondrial thioredoxin-reductase |
| | {GENE: TRXR2A} - Homo sapiens (Human) |
| 299 | (Q99475) KM-102-DERIVED REDUCTASE-LIKE FACTOR |
| | (THioredoxin-reductase) - Homo sapiens (Human) |
| 300 | (Q99P49) Thioredoxin-reductase 1 {GENE: TXNRD1} - |
| | Mus musculus (Mouse) |
| 301 | (Q9CSV5) Thioredoxin-reductase 1 (Fragment) |
| | {GENE: TXNRD1} - Mus musculus (Mouse) |
| 302 | (Q9CZE5) Thioredoxin-reductase 1 {GENE: TXNRD1} - |
| | Mus musculus (Mouse) |
| 303 | (Q9JHA7) Thioredoxin-reductase TR3 {GENE: TXNRD2 |
| | OR TR3} - Mus musculus (Mouse) |
| 304 | (Q9JLT4) Thioredoxin-reductase {GENE: TXNRD2 OR |
| | TRXR2} - Mus musculus (Mouse) |
| 305 | (Q9JMH5) Thioredoxin-reductase 2 {GENE: TXNRD2 OR |
| | TXNRD2} - Mus musculus (Mouse) |
| 306 | (Q9JMH6) Thioredoxin-reductase 1 {GENE: TXNRD1 OR |
| | TXNRD1} - Mus musculus (Mouse) |
| 307 | (O89049) Thioredoxin-reductase - Rattus norvegicus |
| | (Rat) |
| 308 | (Q9JKZ3) Thioredoxin-reductase 1 (Fragment) - Rattus |
| | norvegicus (Rat) |
| 309 | (Q9JKZ4) Thioredoxin-reductase 1 - Rattus norvegicus |
| | (Rat) |
| 310 | (Q9JLE6) Thioredoxin-reductase (Fragment) - Rattus |
| | norvegicus (Rat) |
| 311 | (Q9R1I3) NADPH-dependent thioredoxin-reductase |
| | {GENE: TRR1} - Rattus norvegicus (Rat) |
| 312 | (Q9Z0J5) Thioredoxin-reductase precursor |
| | {GENE: TRXR2} - Rattus norvegicus (Rat) |
| 313 | (Q9MYY8) Redox enzyme thioredoxin-reductase - Sus |
| | scrofa (Pig) |

The application's sequence listing, which the Patent Office published only in electronic form, follows.

SEQUENCE LISTING (313 sequences)

SEQ ID NO: 1 - DNA, 22 bp, Artificial Sequence
  Primer
taccatggcttcggaagaagga

SEQ ID NO: 2 - DNA, 22 bp, Artificial Sequence
  Primer
gaaagcttaagccaagtgtttg

SEQ ID NO: 3 - DNA, 36 bp, Artificial Sequence
  Primer
ggccagcacactaccatgaatggtctcgaaactcac

SEQ ID NO: 4 - DNA, 28 bp, Artificial Sequence
  Primer
ttaagcttcaatcactcttaccttgctg

SEQ ID NO: 5 - DNA, 72 bp, Artificial Sequence
  Primer
actggagatgttgactcgacggatactacggattggtcgacggctatggaagaaggacaagtgatcgcctgc

SEQ ID NO: 6 - DNA, 80 bp, Artificial Sequence
  Primer
atccgtcgagtcaacatctccagtttcctcggtggtctcgttagccttcgatccagcaatctcttgtaagaatgctctgc

SEQ ID NO: 7 - DNA, 22 bp, Artificial Sequence
  Primer
gtggaagcttatggagatggag

SEQ ID NO: 8 - DNA, 1002 bp, Arabidopsis thaliana
atgaatggtctcgaaactcacaacacaaggctctgtatcgtaggaagtggcccagcggcacacacggcggcgatttacgcagctagggctgaacttaaacctcttctcttcgaaggatggatggctaacgacatcgctcccggtggtcaactaacaaccaccaccgacgtcgagaatttccccggatttccagaaggtattctcggagtagagctcactgacaaattccgtaaacaatcggagcgattcggtactacgatatttacagagacggtgacgaaagtcgatttctcttcgaaaccgtttaagctattcacagattcaaaagccattctcgctgacgctgtgattctcgctactggagctgtggctaagcggcttagcttcgttggatctggtgaaggttctggaggtttctggaaccgtggaatctccgcttgtgctgtttgcgacggagctgctccgatattccgtaacaaacctcttgcggtgatcggtggaggcgattcagcaatggaagaagcaaactttcttacaaaatatggatctaaagtgtatataatccataggagagatgcttttagagcgtctaagattatgcagcagcgagctttgtctaatcctaagattgatgtgatttggaactcgtctgttgtggaagcttatggagatggagaaagagatgtgcttggaggattgaaagtgaagaatgtggttaccggagatgtttctgatttaaaagtttctggattgttctttgctattggtcatgagccagctaccaagtttttggatggtggtgttgagttagattcggatggttatgttgtcacgaagcctggtactacacagactagcgttcccggagttttcgctgcgggtgatgttcaggataagaagtataggcaagccatcactgctgcaggaactgggtgcatggcagctttggatgcagagcattacttacaagagattggatctcagcaaggtaagagtgattga

SEQ ID NO: 9 - DNA, 999 bp, Arabidopsis thaliana
atgaatggtctcgaaactcacaacacaaggctctgtatcgtaggaagtggcccagcggcacacacggcggcgatttacgcagctagggctgaacttaaacctcttctcttcgaaggatggatggctaacgacatcgctcccggtggtcaactcaaccaaccaccgcgtgagaatttccccggatttccagaaggtattctcggagtagagctcactgacaaattccgtaaacaatcggagcgattcggtactacgatatttacagagacggtgacgaaagtcgatttctcttcgaaaccgtttaagctattcacagattcaaaagccattctcgctgacgctgtgattctcgctatcggagctgtggctaagtggcttagcttcgttggatctggtgaagttctcggaggtttgtggaaccgtggaatctccgcttgtgctgtttgcgacggagctgctccgatattccgcaacaaacctcttgcggtgatcggtggaggcgattctgcaatggaagaagcaaactttcttacaaaatatggatctaaagtgtatataatcgataggagagatgcttttagagcgtctaagattatgcagcagcgagctttgtctaatcctaagattgatgtgatttggaactcgtctgttgtggaagcttatggagatggagaaagagatgtgcttggaggattgaaagtgaagaatgtggttaccggagatgtttctgatttaaaagtttctggattgttctttgctattggtcatgagccagctaccaagtttttggatggtggtgttgagttagattcggatggttatgttgtcacgaagcctggtactacacagactagcgttcccggagttttcgctgcgggtgatgttcaggataagaagtataggcaagccatcactgctgcaggaactgggtgcatggcagctttggatgcagagcattacttacaagagattggatctcagcaaggtaagagtgattga

SEQ ID NO: 10 - DNA, 1002 bp, Arabidopsis thaliana; identical to SEQ ID NO: 8
  CDS (1)...(1002): cDNA encoding NADPH thioredoxin reductase

SEQ ID NO: 11 - protein, 333 aa, Arabidopsis thaliana
MNGLETHNTRLCIVGSGPAAHTAAIYAARAELKPLLFEGWMANDIAPGGQLTTTTDVENFPGFPEGILGVELTDKFRKQSERFGTTIFTETVTKVDFSSKPFKLFTDSKAILADAVILATGAVAKRLSFVGSGEGSGGFWNRGISACAVCDGAAPIFRNKPLAVIGGGDSAMEEANFLTKYGSKVYIIHRRDAFRASKIMQQRALSNPKIDVIWNSSVVEAYGDGERDVLGGLKVKNVVTGDVSDLKVSGLFFAIGHEPATKFLDGGVELDSDGYVVTKPGTTQTSVPGVFAAGDVQDKKYRQAITAAGTGCMAALDAEHYLQEIGSQQGKSD

SEQ ID NO: 12 - protein, 332 aa, Arabidopsis thaliana
MNGLETHNTRLCIVGSGPAAHTAAIYAARAELKPLLFEGWMANDIAPGGQLNQPPRENFPGFPEGILGVELTDKFRKQSERFGTTIFTETVTKVDFSSKPFKLFTDSKAILADAVILAIGAVAKWLSFVGSGEVLGGLWNRGISACAVCDGAAPIFRNKPLAVIGGGDSAMEEANFLTKYGSKVYIIDRRDAFRASKIMQQRALSNPKIDVIWNSSVVEAYGDGERDVLGGLKVKNVVTGDVSDLKVSGLFFAIGHEPATKFLDGGVELDSDGYVVTKPGTTQTSVPGVFAAGDVQDKKYRQAITAAGTGCMAALDAEHYLQEIGSQQGKSD

SEQ ID NO: 13 - protein, 333 aa, Arabidopsis thaliana; identical to SEQ ID NO: 11

SEQ ID NO: 14 - DNA, 3129 bp, Artificial Sequence
  CDS (1555)...(1899): Chimeric: Arabidopis thioredoxin h gene derived from Arabidopsis thaliana fused with the phaseolin promotor and phaseolin terminator derived from Phaseolus vulgaris
ctgcaggaattcattgtactcccagtatcattatagtgaaagttttggctctctcgccggtggttttttacctctatttaaaggggttttccacctaaaaattctggtatcattctcactttacttgttactttaatttctcataatctttggttgaaattatcacgcttccgcacacgatatccctacaaatttattatttgttaaacattttcaaaccgcataaaattttatgaagtcccgtctatctttaatgtagtctaacattttcatattgaaatatataatttacttaattttagcgttggtagaaagcataatgatttattcttattcttcttcatataaatgtttaatatacaatataaacaaattctttaccttaagaaggatttcccattttatattttaaaaatatatttatcaaatatttttcaaccacgtaaatctcataataataagttgtttcaaaagtaataaaatttaactccataatttttttattcgactgatcttaaagcaacacccagtgacacaactagccatttttttctttgaataaaaaaatccaattatcattgtattttttttatacaatgaaaatttcaccaaacaatcatttgtggtatttctgaagcaagtcatgttatgcaaaattctataattcccatttgacactacggaagtaactgaagatctgcttttacatgcgagacacatcttctaaagtaattttaataatagttactatattcaagatttcatatatcaaatactcaatattacttctaaaaaattaattagatataattaaaatattacttttttaattttaagtttaattgttgaatttgtgactattgatttattattctactatgtttaaattgttttatagatagtttaaagtaaatataagtaatgtagtagagtgttagagtgttaccctaaaccataaactataagatttatggtggactaattttcatatatttcttattgcttttaccttttcttggtatgtaagtccgtaactggaattactgtgggttgccatggcactctgtggtcttttggttcatgcatggatgcttgcgcaagaaaaagacaaagaacaaagaaaaaagacaaaacagagagacaaaacgcaatcacacaaccaactcaaattagtcactggctgatcaagatcgccgcgtccatgtatgtctaaatgccatgcaaagcaacacgtgcttaacatgcactttaaatggctcacccatctcaacccacacacaaacacattgcctttttcttcatcatcaccacaaccacctgtatatattcattctcttccgccacctcaatttcttcacttcaacacacgtcaacctgcatatgcgtgtcatcccatgcccaaatctccatgcatgttccaaccaccttctctcttatataatacctataaatacctctaatatcactcacttctttcatcatccatccatccagagtactactactctactactataataccccaacccaactcatattcaatactactctactatggcttcggaagaaggacaagtgatcgcctgccacaccgttgagacatggaacgagcagcttcagaaggctaatgaatccaaaactcttgtggtggttgatttcacggcttcttggtgtggaccatgtcgtttcatcgctccattctttgctgatttggctaagaaacttcctaacgtgcttttcctcaaggttgatactgatgaattgaagtcggtggcaagtgattgggcgatacaggcgatgccaaccttcatgtttttgaaggaagggaagattttggacaaagttgttggagccaagaaagatgagcttcagtctaccattgccaaacacttggcttaagcttaataagtatgaactaaaatgcatgtaggtgtaagagctcatggagagcatggaatattgtatccgaccatgtaacagtataataactgagctccatctcacttcttctatgaataaacaaaggatgttatgatatattaacactctatctatgcaccttattgttctatgataaatttcctcttattattataaatcatctgaatcgtgacggcttatggaatgcttcaaatagtacaaaaacaaatgtgtactataagactttctaaacaattctaactttagcattgtgaacgagacataagtgttaagaagacataacaattataatggaagaagtttgtctccatttatatattatatattacccacttatgtattatattaggatgttaaggagacataacaattataaagagagaagtttgtatccatttatatattatatactacccatttatatattatacttatccacttatttaatgtctttataaggtttgatccatgatatttctaatattttagttgatatgtatatgaaagggtactatttgaactctcttactctgtataaaggttggatcatccttaaagtgggtctatttaattttattgcttcttacagataaaaaaaaaattatgagttggtttgataaaatattgaaggatttaaaataataataaataataaataacatataatatatgtatataaatttattataatataacatttatctataaaaaagtaaatattgtcataaatctatacaatcgtttagccttgctggacgactctcaattatttaaacgagagtaaacatatttgactttttggttatttaacaaattattatttaacactatatgaaattttttttttttatcggcaaggaaataaaattaaattaggagggacaatggtgtgtcccaatccttatacaaccaacttccacaggaaggtcaggtcggggacaacaaaaaaacaggcaagggaaattttttaatttgggttgtcttgtttgctgcataatttatgcagtaaaacactacacataacccttttagcagtagagcaatggttgaccgtgtgcttagcttcttttattttatttttttatcagcaaagaataaataaaataaaatgagacacttcagggatgtttcaacccttatacaaaaccccaaaaacaagtttcctagcaccctaccaactaaggtacc

SEQ ID NO: 15 - protein, 114 aa, Artificial Sequence
  Arabidopis thaliana
MASEEGQVIACHTVETWNEQLQKANESKTLVVVDFTASWCGPCRFIAPFFADLAKKLPNVLFLKVDTDELKSVASDWAIQAMPTFMFLKEGKILDKVVGAKKDELQSTIAKHLA

SEQ ID NO: 16 - DNA, 3888 bp, Artificial sequence
  Chimeric: Arabidopis oleosin gene derived from Arabidopsis thaliana fused with the phaseolin promotor and phaseolin terminator derived from Phaseolus vulgaris
  CDS (1555)...(1907)
  CDS (2148)...(2659)
ctgcaggaattcattgtactcccagtatcattatagtgaaagttttggctctctcgccggtggttttttacctctatttaaaggggttttccacctaaaaattctggtatcattctcactttacttgttactttaatttctcataatctttggttgaaattatcacgcttccgcacacgatatccctacaaatttattatttgttaaacattttcaaaccgcataaaattttatgaagtcccgtctatctttaatgtagtctaacattttcatattgaaatatataatttacttaattttagcgttggtagaaagcataatgatttattcttattcttcttcatataaatgtttaatatacaatataaacaaattctttaccttaagaaggatttcccattttatattttaaaaatatatttatcaaatatttttcaaccacgtaaatctcataataataagttgtttcaaaagtaataaaatttaactccataatttttttattcgactgatcttaaagcaacacccagtgacacaactagccatttttttctttgaataaaaaaatccaattatcattgtattttttttatacaatgaaaatttcaccaaacaatcatttgtggtatttctgaagcaagtcatgttatgcaaaattctataattcccatttgacactacggaagtaactgaagatctgcttttacatgcgagacacatcttctaaagtaattttaataatagttactatattcaagatttcatatatcaaatactcaatattacttctaaaaaattaattagatataattaaaatattacttttttaattttaagtttaattgttgaatttgtgactattgatttattattctactatgtttaaattgttttatagatagtttaaagtaaatataagtaatgtagtagagtgttagagtgttaccctaaaccataaactataagatttatggtggactaattttcatatatttcttattgcttttaccttttcttggtatgtaagtccgtaactggaattactgtgggttgccatggcactctgtggtcttttggttcatgcatggatgcttgcgcaagaaaaagacaaagaacaaagaaaaaagacaaaacagagagacaaaacgcaatcacacaaccaactcaaattagtcactggctgatcaagatcgccgcgtccatgtatgtctaaatgccatgcaaagcaacacgtgcttaacatgcactttaaatggctcacccatctcaacccacacacaaacacattgcctttttcttcatcatcaccacaaccacctgtatatattcattctcttccgccacctcaatttcttcacttcaacacacgtcaacctgcatatgcgtgtcatcccatgcccaaatctccatgcatgttccaaccaccttctctcttatataatacctataaatacctctaatatcactcacttctttcatcatccatccatccagagtactactactctactactataataccccaacccaactcatattcaatactactctactatggcggatacagctagaggaacccatcacgatatcatcggcagagaccagtacccgatgatgggccgagaccgagaccagtaccagatgtccggacgaggatctgactactccaagtctaggcagattgctaaagctgcaactgctgtcacagctggtggttccctccttgttctctccagccttacccttgttggaactgtcatagctttgactgttgcaacacctctgctcgttatcttcagcccaatccttgtcccggctctcatcacagttgcactcctcatcaccggttttctttcctctggagggtttggcattgccgctataaccgttttctcttggatttacaagtaagcacacatttatcatcttacttcataattttgtgcaatatgtgcatgcatgtgttgagccagtagctttggatcaatttttttggtcgaataacaaatgtaacaataagaaattgcaaattctagggaacatttggttaactaaatacgaaatttgacctagctagcttgaatgtgtctgtgtatatcatctatataggtaaaatgcttggtatgatacctattgattgtgaataggtacgcaacgggagagcacccacagggatcagacaagttggacagtgcaaggatgaagttgggaagcaaagctcaggatctgaaagacagagctcagtactacggacagcaacatactggtggggaacatgaccgtgaccgtactcgtggtggccagcacactaccatggcttcggaagaaggacaagtgatcgcctgccacaccgttgagacatggaacgagcagcttcagaaggctaatgaatccaaaactcttgtggtggttgatttcacggcttcttggtgtggaccatgtcgtttcatcgctccattctttgctgatttggctaagaaacttcctaacgtgcttttcctcaaggttgatactgatgaattgaagtcggtggcaagtgattgggcgatacaggcgatgccaaccttcatgtttttgaaggaagggaagattttggacaaagttgttggagccaagaaagatgagcttcagtctaccattgccaaacacttggcttaagcttaataagtatgaactaaaatgcatgtaggtgtaagagctcatggagagcatggaatattgtatccgaccatgtaacagtataataactgagctccatctcacttcttctatgaataaacaaaggatgttatgatatattaacactctatctatgcaccttattgttctatgataaatttcctcttattattataaatcatctgaatcgtgacggcttatggaatgcttcaaatagtacaaaaacaaatgtgtactataagactttctaaacaattctaactttagcattgtgaacgagacataagtgttaagaagacataacaattataatggaagaagtttgtctccatttatatattatatattacccacttatgtattatattaggatgttaaggagacataacaattataaagagagaagtttgtatccatttatatattatatactacccatttatatattatacttatccacttatttaatgtctttataaggtttgatccatgatatttctaatattttagttgatatgtatatgaaagggtactatttgaactctcttactctgtataaaggttggatcatccttaaagtgggtctatttaattttattgcttcttacagataaaaaaaaaattatgagttggtttgataaaatattgaaggatttaaaataataataaataataaataacatataatatatgtatataaatttattataatataacatttatctataaaaaagtaaatattgtcataaatctatacaatcgtttagccttgctggacgactctcaattatttaaacgagagtaaacatatttgactttttggttatttaacaaattattatttaacactatatgaaattttttttttttatcggcaaggaaataaaattaaattaggagggacaatggtgtgtcccaatccttatacaaccaacttccacaggaaggtcaggtcggggacaacaaaaaaacaggcaagggaaattttttaatttgggttgtcttgtttgctgcataatttatgcagtaaaacactacacataacccttttagcagtagagcaatggttgaccgtgtgcttagcttcttttattttatttttttatcagcaaagaataaataaaataaaatgagacacttcagggatgtttcaacccttatacaaaaccccaaaaacaagtttcctagcaccctaccaactaaggtacc

SEQ ID NO: 17 - protein, 118 aa, Arabidopsis thaliana
MADTARGTHHDIIGRDQYPMMGRDRDQYQMSGRGSDYSKSRQIAKAATAVTAGGSLLVLSSLTLVGTVIALTVATPLLVIFSPILVPALITVALLITGFLSSGGFGIAAITVFSWIYK

SEQ ID NO: 18 - protein, 169 aa, Arabidopsis thaliana
YATGEHPQGSDKLDSARMKLGSKAQDLKDRAQYYGQQHTGGEHDRDRTRGGQHTTMASEEGQVIACHTVETWNEQLQKANESKTLVVVDFTASWCGPCRFIAPFFADLAKKLPNVLFLKVDTDELKSVASDWAIQAMPTFMFLKEGKILDKVVGAKKDELQSTIAKHLA

SEQ ID NO: 19 - DNA, 3888 bp, Artificial Sequence
  Chimeric: Arabidopis thioredoxin h gene and oleosin gene derived from Arabidopsis thaliana fused with phaseolin promotor and phaseolin terminator derived from Phaseolus vulgaris
  CDS (1555)...(2249)
  CDS (2490)...(2658)
ctgcaggaattcattgtactcccagtatcattatagtgaaagttttggctctctcgccggtggttttttacctctatttaaaggggttttccacctaaaaattctggtatcattctcactttacttgttactttaatttctcataatctttggttgaaattatcacgcttccgcacacgatatccctacaaatttattatttgttaaacattttcaaaccgcataaaattttatgaagtcccgtctatctttaatgtagtctaacattttcatattgaaatatataatttacttaattttagcgttggtagaaagcataatgatttattcttattcttcttcatataaatgtttaatatacaatataaacaaattctttaccttaagaaggatttcccattttatattttaaaaatatatttatcaaatatttttcaaccacgtaaatctcataataataagttgtttcaaaagtaataaaatttaactccataatttttttattcgactgatcttaaagcaacacccagtgacacaactagccatttttttctttgaataaaaaaatccaattatcattgtattttttttatacaatgaaaatttcaccaaacaatcatttgtggtatttctgaagcaagtcatgttatgcaaaattctataattcccatttgacactacggaagtaactgaagatctgcttttacatgcgagacacatcttctaaagtaattttaataatagttactatattcaagatttcatatatcaaatactcaatattacttctaaaaaattaattagatataattaaaatattacttttttaattttaagtttaattgttgaatttgtgactattgatttattattctactatgtttaaattgttttatagatagtttaaagtaaatataagtaatgtagtagagtgttagagtgttaccctaaaccataaactataagatttatggtggactaattttcatatatttcttattgcttttaccttttcttggtatgtaagtccgtaactggaattactgtgggttgccatggcactctgtggtcttttggttcatgcatggatgcttgcgcaagaaaaagacaaagaacaaagaaaaaagacaaaacagagagacaaaacgcaatcacacaaccaactcaaattagtcactggctgatcaagatcgccgcgtccatgtatgtctaaatgccatgcaaagcaacacgtgcttaacatgcactttaaatggctcacccatctcaacccacacacaaacacattgcctttttcttcatcatcaccacaaccacctgtatatattcattctcttccgccacctcaatttcttcacttcaacacacgtcaacctgcatatgcgtgtcatcccatgcccaaatctccatgcatgttccaaccaccttctctcttatataatacctataaatacctctaatatcactcacttctttcatcatccatccatccagagtactactactctactactataataccccaacccaactcatattcaatactactctactatggcttcggaagaaggacaagtgatcgcctgccacaccgttgagacatggaacgagcagcttcagaaggctaatgaatccaaaactcttgtggtggttgatttcacggcttcttggtgtggaccatgtcgtttcatcgctccattctttgctgatttggctaagaaacttcctaacgtgcttttcctcaaggttgatactgatgaattgaagtcggtggcaagtgattgggcgatacaggcgatgccaaccttcatgtttttgaaggaagggaagattttggacaaagttgttggagccaagaaagatgagcttcagtctaccattgccaaacacttggctatggcggatacagctagaggaacccatcacgatatcatcggcagagaccagtacccgatgatgggccgagaccgagaccagtaccagatgtccggacgaggatctgactactccaagtctaggcagattgctaaagctgcaactgctgtcacagctggtggttccctccttgttctctccagccttacccttgttggaactgtcatagctttgactgttgcaacacctctgctcgttatcttcagcccaatccttgtcccggctctcatcacagttgcactcctcatcaccggttttctttcctctggagggtttggcattgccgctataaccgttttctcttggatttacaagtaagcacacatttatcatcttacttcataattttgtgcaatatgtgcatgcatgtgttgagccagtagctttggatcaatttttttggtcgaataacaaatgtaacaataagaaattgcaaattctagggaacatttggttaactaaatacgaaatttgacctagctagcttgaatgtgtctgtgtatatcatctatataggtaaaatgcttggtatgatacctattgattgtgaataggtacgcaacgggagagcacccacagggatcagacaagttggacagtgcaaggatgaagttgggaagcaaagctcaggatctgaaagacagagctcagtactacggacagcaacatactggtggggaacatgaccgtgaccgtactcgtggtggccagcacactacttaagcttaataagtatgaactaaaatgcatgtaggtgtaagagctcatggagagcatggaatattgtatccgaccatgtaacagtataataactgagctccatctcacttcttctatgaataaacaaaggatgttatgatatattaacactctatctatgcaccttattgttctatgataaatttcctcttattattataaatcatctgaatcgtgacggcttatggaatgcttcaaatagtacaaaaacaaatgtgtactataagactttctaaacaattctaactttagcattgtgaacgagacataagtgttaagaagacataacaattataatggaagaagtttgtctccatttatatattatatattacccacttatgtattatattaggatgttaaggagacataacaattataaagagagaagtttgtatccatttatatattatatactacccatttatatattatacttatccacttatttaatgtctttataaggtttgatccatgatatttctaatattttagttgatatgtatatgaaagggtactatttgaactctcttactctgtataaaggttggatcatccttaaagtgggtctatttaattttattgcttcttacagataaaaaaaaaattatgagttggtttgataaaatattgaaggatttaaaataataataaataataaataacatataatatatgtatataaatttattataatataacatttatctataaaaaagtaaatattgtcataaatctatacaatcgtttagccttgctggacgactctcaattatttaaacgagagtaaacatatttgactttttggttatttaacaaattattatttaacactatatgaaattttttttttttatcggcaaggaaataaaattaaattaggagggacaatggtgtgtcccaatccttatacaaccaacttccacaggaaggtcaggtcggggacaacaaaaaaacaggcaagggaaattttttaatttgggttgtcttgtttgctgcataatttatgcagtaaaacactacacataacccttttagcagtagagcaatggttgaccgtgtgcttagcttcttttattttatttttttatcagcaaagaataaataaaataaaatgagacacttcagggatgtttcaacccttatacaaaaccccaaaaacaagtttcctagcaccctaccaactaaggtacc

SEQ ID NO: 20 - protein, 232 aa, Arabidopsis thaliana
MASEEGQVIACHTVETWNEQLQKANESKTLVVVDFTASWCGPCRFIAPFFADLAKKLPNVLFLKVDTDELKSVASDWAIQAMPTFMFLKEGKILDKVVGAKKDELQSTIAKHLAMADTARGTHHDIIGRDQYPMMGRDRDQYQMSGRGSDYSKSRQIAKAATAVTAGGSLLVLSSLTLVGTVIALTVATPLLVIFSPILVPALITVALLITGFLSSGGFGIAAITVFSWIYK

SEQ ID NO: 21 - protein, 55 aa, Artificial Sequence
  Arabidopsis thaliana
YATGEHPQGSDKLDSARMKLGSKAQDLKDRAQYYGQQHTGGEHDRDRTRGGQHTT

SEQ ID NO: 22 - DNA, 3787 bp, Artificial Sequence
  Chimeric: Arabidopis thioredoxin-reductase gene and oleosin gene derived from Arabidopsis thaliana fused with phaseolin promotor and phaseolin terminator derived from Phaseolus vulgaris
  CDS (1555)...(2556)
ctgcaggaattcattgtactcccagtatcattatagtgaaagttttggctctctcgccggtggttttttacctctatttaaaggggttttccacctaaaaattctggtatcattctcactttacttgttactttaatttctcataatctttggttgaaattatcacgcttccgcacacgatatccctacaaatttattatttgttaaacattttcaaaccgcataaaattttatgaagtcccgtctatctttaatgtagtctaacattttcatattgaaatatataatttacttaattttagcgttggtagaaagcataatgatttattcttattcttcttcatataaatgtttaatatacaatataaacaaattctttaccttaagaaggatttcccattttatattttaaaaatatatttatcaaatatttttcaaccacgtaaatctcataataataagttgtttcaaaagtaataaaatttaactccataatttttttattcgactgatcttaaagcaacacccagtgacacaactagccatttttttctttgaataaaaaaatccaattatcattgtattttttttatacaatgaaaatttcaccaaacaatcatttgtggtatttctgaagcaagtcatgttatgcaaaattctataattcccatttgacactacggaagtaactgaagatctgcttttacatgcgagacacatcttctaaagtaattttaataatagttactatattcaagatttcatatatcaaatactcaatattacttctaaaaaattaattagatataattaaaatattacttttttaattttaagtttaattgttgaatttgtgactattgatttattattctactatgtttaaattgttttatagatagtttaaagtaaatataagtaatgtagtagagtgttagagtgttaccctaaaccataaactataagatttatggtggactaattttcatatatttcttattgcttttaccttttcttggtatgtaagtccgtaactggaattactgtgggttgccatggcactctgtggtcttttggttcatgcatggatgcttgcgcaagaaaaagacaaagaacaaagaaaaaagacaaaacagagagacaaaacgcaatcacacaaccaactcaaattagtcactggctgatcaagatcgccgcgtccatgtatgtctaaatgccatgcaaagcaacacgtgcttaacatgcactttaaatggctcacccatctcaacccacacacaaacacattgcctttttcttcatcatcaccacaaccacctgtatatattcattctcttccgccacctcaatttcttcacttcaacacacgtcaacctgcatatgcgtgtcatcccatgcccaaatctccatgcatgttccaaccaccttctctcttatataatacctataaatacctctaatatcactcacttctttcatcatccatccatccagagtactactactctactactataataccccaacccaactcatattcaatactactctactatgaatggtctcgaaactcacaacacaaggctctgtatcgtaggaagtggcccagcggcacacacggcggcgatttacgcagctagggctgaacttaaacctcttctcttcgaaggatggatggctaacgacatcgctcccggtggtcaactaacaaccaccaccgacgtcgagaatttccccggatttccagaaggtattctcggagtagagctcactgacaaattccgtaaacaatcggagcgattcggtactacgatatttacagagacggtgacgaaagtcgatttctcttcgaaaccgtttaagctattcacagattcaaaagccattctcgctgacgctgtgattctcgctactggagctgtggctaagcggcttagcttcgttggatctggtgaaggttctggaggtttctggaaccgtggaatctccgcttgtgctgtttgcgacggagctgctccgatattccgtaacaaacctcttgcggtgatcggtggaggcgattcagcaatggaagaagcaaactttcttacaaaatatggatctaaagtgtatataatccataggagagatgcttttagagcgtctaagattatgcagcagcgagctttgtctaatcctaagattgatgtgatttggaactcgtctgttgtggaagcttatggagatggagaaagagatgtgcttggaggattgaaagtgaagaatgtggttaccggagatgtttctgatttaaaagtttctggattgttctttgctattggtcatgagccagctaccaagtttttggatggtggtgttgagttagattcggatggttatgttgtcacgaagcctggtactacacagactagcgttcccggagttttcgctgcgggtgatgttcaggataagaagtataggcaagccatcactgctgcaggaactgggtgcatggcagctttggatgcagagcattacttacaagagattggatctcagcaaggtaagagtgattgaagcttaataagtatgaactaaaatgcatgtaggtgtaagagctcatggagagcatggaatattgtatccgaccatgtaacagtataataactgagctccatctcacttcttctatgaataaacaaaggatgttatgatatattaacactctatctatgcaccttattgttctatgataaatttcctcttattattataaatcatctgaatcgtgacggcttatggaatgcttcaaatagtacaaaaacaaatgtgtactataagactttctaaacaattctaactttagcattgtgaacgagacataagtgttaagaagacataacaattataatggaagaagtttgtctccatttatatattatatattacccacttatgtattatattaggatgttaaggagacataacaattataaagagagaagtttgtatccatttatatattatatactacccatttatatattatacttatccacttatttaatgtctttataaggtttgatccatgatatttctaatattttagttgatatgtatatgaaagggtactatttgaactctcttactctgtataaaggttggatcatccttaaagtgggtctatttaattttattgcttcttacagataaaaaaaaaattatgagttggtttgataaaatattgaaggatttaaaataataataaataataaataacatataatatatgtatataaatttattataatataacatttatctataaaaaagtaaatattgtcataaatctatacaatcgtttagccttgctggacgactctcaattatttaaacgagagtaaacatatttgactttttggttatttaacaaattattatttaacactatatgaaattttttttttttatcggcaaggaaataaaattaaattaggagggacaatggtgtgtcccaatccttatacaaccaacttccacaggaaggtcaggtcggggacaacaaaaaaacaggcaagggaaattttttaatttgggttgtcttgtttgctgcataatttatgcagtaaaacactacacataacccttttagcagtagagcaatggttgaccgtgtgcttagcttcttttattttatttttttatcagcaaagaataaataaaataaaatgagacacttcagggatgtttcaacccttatacaaaaccccaaaaacaagtttcctagcaccctaccaactaaggtacc

SEQ ID NO: 23 - protein, 333 aa, Arabidopsis thaliana; identical to SEQ ID NO: 11

SEQ ID NO: 24 - DNA, 4546 bp, Artificial Sequence
  CDS (1555)...(1907)
  CDS (2148)...(3315): Chimeric: Arabidopsis oleosin and thioredoxin-reductase gene derived from Arabidopsis thaliana fused with phaseolin promotor and phaseolin terminator derived from Phaseolus vulgaris.
ctgcaggaattcattgtactcccagtatcattatagtgaaagttttggctctctcgccggtggttttttacctctatttaaaggggttttccacctaaaaattctggtatcattctcactttacttgttactttaatttctcataatctttggttgaaattatcacgcttccgcacacgatatccctacaaatttattatttgttaaacattttcaaaccgcataaaattttatgaagtcccgtctatctttaatgtagtctaacattttcatattgaaatatataatttacttaattttagcgttggtagaaagcataatgatttattcttattcttcttcatataaatgtttaatatacaatataaacaaattctttaccttaagaaggatttcccattttatattttaaaaatatatttatcaaatatttttcaaccacgtaaatctcataataataagttgtttcaaaagtaataaaatttaactccataatttttttattcgactgatcttaaagcaacacccagtgacacaactagccatttttttctttgaataaaaaaatccaattatcattgtattttttttatacaatgaaaatttcaccaaacaatcatttgtggtatttctgaagcaagtcatgttatgcaaaattctataattcccatttgacactacggaagtaactgaagatctgcttttacatgcgagacacatcttctaaagtaattttaataatagttactatattcaagatttcatatatcaaatactcaatattacttctaaaaaattaattagatataattaaaatattacttttttaattttaagtttaattgttgaatttgtgactattgatttattattctactatgtttaaattgttttatagatagtttaaagtaaatataagtaatgtagtagagtgttagagtgttaccctaaaccataaactataagatttatggtggactaattttcatatatttcttattgcttttaccttttcttggtatgtaagtccgtaactggaattactgtgggttgccatggcactctgtggtcttttggttcatgcatggatgcttgcgcaagaaaaagacaaagaacaaagaaaaaagacaaaacagagagacaaaacgcaatcacacaaccaactcaaattagtcactggctgatcaagatcgccgcgtccatgtatgtctaaatgccatgcaaagcaacacgtgcttaacatgcactttaaatggctcacccatctcaacccacacacaaacacattgcctttttcttcatcatcaccacaaccacctgtatatattcattctcttccgccacctcaatttcttcacttcaacacacgtcaacctgcatatgcgtgtcatcccatgcccaaatctccatgcatgttccaaccaccttctctcttatataatacctataaatacctctaatatcactcacttctttcatcatccatccatccagagtactactactctactactataataccccaacccaactcatattcaatactactctactatggcggatacagctagaggaacccatcacgatatcatcggcagagaccagtacccgatgatgggccgagaccgagaccagtaccagatgtccggacgaggatctgactactccaagtctaggcagattgctaaagctgcaactgctgtcacagctggtggttccctccttgttctctccagccttacccttgttggaactgtcatagctttgactgttgcaacacctctgctcgttatcttcagcccaatccttgtcccggctctcatcacagttgcactcctcatcaccggttttctttcctctggagggtttggcattgccgctataaccgttttctcttggatttacaagtaagcacacatttatcatcttacttcataattttgtgcaatatgtgcatgcatgtgttgagccagtagctttggatcaatttttttggtcgaataacaaatgtaacaataagaaattgcaaattctagggaacatttggttaactaaatacgaaatttgacctagctagcttgaatgtgtctgtgtatatcatctatataggtaaaatgcttggtatgatacctattgattgtgaataggtacgcaacgggagagcacccacagggatcagacaagttggacagtgcaaggatgaagttgggaagcaaagctcaggatctgaaagacagagctcagtactacggacagcaacatactggtggggaacatgaccgtgaccgtactcgtggtggccagcacactaccatgaatggtctcgaaactcacaacacaaggctctgtatcgtaggaagtggcccagcggcacacacggcggcgatttacgcagctagggctgaacttaaacctcttctcttcgaaggatggatggctaacgacatcgctcccggtggtcaactaacaaccaccaccgacgtcgagaatttccccggatttccagaaggtattctcggagtagagctcactgacaaattccgtaaacaatcggagcgattcggtactacgatatttacagagacggtgacgaaagtcgatttctcttcgaaaccgtttaagctattcacagattcaaaagccattctcgctgacgctgtgattctcgctactggagctgtggctaagcggcttagcttcgttggatctggtgaaggttctggaggtttctggaaccgtggaatctccgcttgtgctgtttgcgacggagctgctccgatattccgtaacaaacctcttgcggtgatcggtggaggcgattcagcaatggaagaagcaaactttcttacaaaatatggatctaaagtgtatataatccataggagagatgcttttagagcgtctaagattatgcagcagcgagctttgtctaatcctaagattgatgtgatttggaactcgtctgttgtggaagcttatggagatggagaaagagatgtgcttggaggattgaaagtgaagaatgtggttaccggagatgtttctgatttaaaagtttctggattgttctttgctattggtcatgagccagctaccaagtttttggatggtggtgttgagttagattcggatggttatgttgtcacgaagcctggtactacacagactagcgttcccggagttttcgctgcgggtgatgttcaggataagaagtataggcaagccatcactgctgcaggaactgggtgcatggcagctttggatgcagagcattacttacaagagattggatctcagcaaggtaagagtgattgaagcttaataagtatgaactaaaatgcatgtaggtgtaagagctcatggagagcatggaatattgtatccgaccatgtaacagtataataactgagctccatctcacttcttctatgaataaacaaaggatgttatgatatattaacactctatctatgcaccttattgttctatgataaatttcctcttattattataaatcatctgaatcgtgacggcttatggaatgcttcaaatagtacaaaaacaaatgtgtactataagactttctaaacaattctaactttagcattgtgaacgagacataagtgttaagaagacataacaattataatggaagaagtttgtctccatttatatattatatattacccacttatgtattatattaggatgttaaggagacataacaattataaagagagaagtttgtatccatttatatattatatactacccatttatatattatacttatccacttatttaatgtctttataaggtttgatccatgatatttctaatattttagttgatatgtatatgaaagggtactatttgaactctcttactctgtataaaggttggatcatccttaaagtgggtctatttaattttattgcttcttacagataaaaaaaaaattatgagttggtttgataaaatattgaaggatttaaaataataataaataataaataacatataatatatgtatataaatttattataatataacatttatctataaaaaagtaaatattgtcataaatctatacaatcgtttagccttgctggacgactctcaattatttaaacgagagtaaacatatttgactttttggttatttaacaaattattatttaacactatatgaaattttttttttttatcggcaaggaaataaaattaaattaggagggacaatggtgtgtcccaatccttatacaaccaacttccacaggaaggtcaggtcggggacaacaaaaaaacaggcaagggaaattttttaatttgggttgtcttgtttgctgcataatttatgcagtaaaacactacacataacccttttagcagtagagcaatggttgaccgtgtgcttagcttcttttattttatttttttatcagcaaagaataaataaaataaaatgagacacttcagggatgtttcaacccttatacaaaaccccaaaaacaagtttcctagcaccctaccaactaaggtacc

SEQ ID NO: 25 - protein, 118 aa, Arabidopsis thaliana; identical to SEQ ID NO: 17

SEQ ID NO: 26 - protein, 388 aa, Arabidopsis thaliana
YATGEHPQGSDKLDSARMKLGSKAQDLKDRAQYYGQQHTGGEHDRDRTRGGQHTTMNGLETHNTRLCIVGSGPAAHTAAIYAARAELKPLLFEGWMANDIAPGGQLTTTTDVENFPGFPEGILGVELTDKFRKQSERFGTTIFTETVTKVDFSSKPFKLFTDSKAILADAVILATGAVAKRLSFVGSGEGSGGFWNRGISACAVCDGAAPIFRNKPLAVIGGGDSAMEEANFLTKYGSKVYIIHRRDAFRASKIMQQRALSNPKIDVIWNSSVVEAYGDGERDVLGGLKVKNVVTGDVSDLKVSGLFFAIGHEPATKFLDGGVELDSDGYVVTKPGTTQTSVPGVFAAGDVQDKKYRQAITAAGTGCMAALDAEHYLQEIGSQQGKSD

SEQ ID NO: 27 - DNA, 4545 bp, Artificial Sequence
  Chimeric: Arabidopsis thioredoxin-reductase and oleosin gene derived from arabidopsis thaliana fused with phaseolin promotor and phaseolin terminator derived from Phaseolus vulgaris.
  CDS (1555)...(2906)
  CDS (3147)...(3315)
ctgcaggaattcattgtactcccagtatcattatagtgaaagttttggctctctcgccggtggttttttacctctatttaaaggggttttccacctaaaaattctggtatcattctcactttacttgttactttaatttctcataatctttggttgaaattatcacgcttccgcacacgatatccctacaaatttattatttgttaaacattttcaaaccgcataaaattttatgaagtcccgtctatctttaatgtagtctaacattttcatattgaaatatataatttacttaattttagcgttggtagaaagcataatgatttattcttattcttcttcatataaatgtttaatatacaatataaacaaattctttaccttaagaaggatttcccattttatattttaaaaatatatttatcaaatatttttcaaccacgtaaatctcataataataagttgtttcaaaagtaataaaatttaactccataatttttttattcgactgatcttaaagcaacacccagtgacacaactagccatttttttctttgaataaaaaaatccaattatcattgtattttttttatacaatgaaaatttcaccaaacaatcatttgtggtatttctgaagcaagtcatgttatgcaaaattctataattcccatttgacactacggaagtaactgaagatctgcttttacatgcgagacacatcttctaaagtaattttaataatagttactatattcaagatttcatatatcaaatactcaatattacttctaaaaaattaattagatataattaaaatattacttttttaattttaagtttaattgttgaatttgtgactattgatttattattctactatgtttaaattgttttatagatagtttaaagtaaatataagtaatgtagtagagtgttagagtgttaccctaaaccataaactataagatttatggtggactaattttcatatatttcttattgcttttaccttttcttggtatgtaagtccgtaactggaattactgtgggttgccatggcactctgtggtcttttggttcatgcatggatgcttgcgcaagaaaaagacaaagaacaaagaaaaaagacaaaacagagagacaaaacgcaatcacacaaccaactcaaattagtcactggctgatcaagatcgccgcgtccatgtatgtctaaatgccatgcaaagcaacacgtgcttaacatgcactttaaatggctcacccatctcaacccacacacaaacacattgcctttttcttcatcatcaccacaaccacctgtatatattcattctcttccgccacctcaatttcttcacttcaacacacgtcaacctgcatatgcgtgtcatcccatgcccaaatctccatgcatgttccaaccaccttctctcttatataatacctataaatacctctaatatcactcacttctttcatcatccatccatccagagtactactactctactactataataccccaacccaactcatattcaatactactctactatgaatggtctcgaaactcacaacacaaggctctgtatcgtaggaagtggcccagcggcacacacggcggcgatttacgcagctagggctgaacttaaacctcttctcttcgaaggatggatggctaacgacatcgctcccggtggtcaactaacaaccaccaccgacgtcgagaatttccccggatttccagaaggtattctcggagtagagctcactgacaaattccgtaaacaatcggagcgattcggtactacgatatttacagagacggtgacgaaagtcgatttctcttcgaaaccgtttaagctattcacagattcaaaagccattctcgctgacgctgtgattctcgctactggagctgtggctaagcggcttagcttcgttggatctggtgaaggttctggaggtttctggaaccgtggaatctccgcttgtgctgtttgcgacggagctgctccgatattccgtaacaaacctcttgcggtgatcggtggaggcgattcagcaatggaagaagcaaactttcttacaaaatatggatctaaagtgtatataatccataggagagatgcttttagagcgtctaagattatgcagcagcgagctttgtctaatcctaagattgatgtgatttggaactcgtctgttgtggaagcttatggagatggagaaagagatgtgcttggaggattgaaagtgaagaatgtggttaccggagatgtttctgatttaaaagtttctggattgttctttgctattggtcatgagccagctaccaagtttttggatggtggtgttgagttagattcggatggttatgttgtcacgaagcctggtactacacagactagcgttcccggagttttcgctgcgggtgatgttcaggataagaagtataggcaagccatcactgctgcaggaactgggtgcatggcagctttggatgcagagcattacttacaagagattggatctcagcaaggtaagagtgatatggcggatacagctagaggaacccatcacgatatcatcggcagagaccagtacccgatgatgggccgagaccgagaccagtaccagatgtccggacgaggatctgactactccaagtctaggcagattgctaaagctgcaactgctgtcacagctggtggttccctccttgttctctccagccttacccttgttggaactgtcatagctttgactgttgcaacacctctgctcgttatcttcagcccaatccttgtcccggctctcatcacagttgcactcctcatcaccggttttctttcctctggagggtttggcattgccgctataaccgttttctcttggatttacaagtaagcacacatttatcatcttacttcataattttgtgcaatatgtgcatgcatgtgttgagccagtagctttggatcaatttttttggtcgaataacaaatgtaacaataagaaattgcaaattctagggaacatttggttaactaaatacgaaatttgacctagctagcttgaatgtgtctgtgtatatcatctatataggtaaaatgcttggtatgatacctattgattgtgaataggtacgcaacgggagagcacccacagggatcagacaagttggacagtgcaaggatgaagttgggaagcaaagctcaggatctgaaagacagagctcagtactacggacagcaacatactggtggggaacatgaccgtgaccgtactcgtggtggccagcacactacttaagcttaataagtatgaactaaaatgcatgtaggtgtaagagctcatggagagcatggaatattgtatccgaccatgtaacagtataataactgagctccatctcacttcttctatgaataaacaaaggatgttatgatatattaacactctatctatgcaccttattgttctatgataaatttcctcttattattataaatcatctgaatcgtgacggcttatggaatgcttcaaatagtacaaaaacaaatgtgtactataagactttctaaacaattctaactttagcattgtgaacgagacataagtgttaagaagacataacaattataatggaagaagtttgtctccatttatatattatatattacccacttatgtattatattaggatgttaaggagacataacaattataaagagagaagtttgtatccatttatatattatatactacccatttatatattatacttatccacttatttaatgtctttataaggtttgatccatgatatttctaatattttagttgatatgtatatgaaagggtactatttgaactctcttactctgtataaaggttggatcatccttaaagtgggtctatttaattttattgcttcttacagataaaaaaaaaattatgagttggtttgataaaatattgaaggatttaaaataataataaataataaataacatataatatatgtatataaatttattataatataacatttatctataaaaaagtaaatattgtcataaatctatacaatcgtttagccttgctggacgactctcaattatttaaacgagagtaaacatatttgactttttggttatttaacaaattattatttaacactatatgaaattttttttttttatcggcaaggaaataaaattaaattaggagggacaatggtgtgtcccaatccttatacaaccaacttccacaggaaggtcaggtcggggacaacaaaaaaacaggcaagggaaattttttaatttgggttgtcttgtttgctgcataatttatgcagtaaaacactacacataacccttttagcagtagagcaatggttgaccgtgtgcttagcttcttttattttatttttttatcagcaaagaataaataaaataaaatgagacacttcagggatgtttcaacccttatacaaaaccccaaaaacaagtttcctagcaccctaccaactaaggtacc

SEQ ID NO: 28 - protein, 451 aa, Artificial Sequence
  Arabidopsis thaliana
MNGLETHNTRLCIVGSGPAAHTAAIYAARAELKPLLFEGWMANDIAPGGQLTTTTDVENFPGFPEGILGVELTDKFRKQSERFGTTIFTETVTKVDFSSKPFKLFTDSKAILADAVILATGAVAKRLSFVGSGEGSGGFWNRGISACAVCDGAAPIFRNKPLAVIGGGDSAMEEANFLTKYGSKVYIIHRRDAFRASKIMQQRALSNPKIDVIWNSSVVEAYGDGERDVLGGLKVKNVVTGDVSDLKVSGLFFAIGHEPATKFLDGGVELDSDGYVVTKPGTTQTSVPGVFAAGDVQDKKYRQAITAAGTGCMAALDAEHYLQEIGSQQGKSDMADTARGTHHDIIGRDQYPMMGRDRDQYQMSGRGSDYSKSRQIAKAATAVTAGGSLLVLSSLTLVGTVIALTVATPLLVIFSPILVPALITVALLITGFLSSGGFGIAAITVFSWIYK

SEQ ID NO: 29 - protein, 55 aa, Artificial Sequence; identical to SEQ ID NO: 21
  Arabidopsis thaliana

SEQ ID NO: 30 - DNA, 4922 bp, Artificial Sequence
  CDS (1555)...(1907)
  CDS (2148)...(3690): Chimeric: Arabidopsis oleosin gene derived from arabidopsis thaliana fused to Mlep thioredoxin-reductase and thioredoxin gene derived from Mycobacterium leprae fused with with the phaseolin promotor and phaseolin terminator derived from Phaseolus vulgaris
ctgcaggaattcattgtactcccagtatcattatagtgaaagttttggctctctcgccggtggttttttacctctatttaaaggggttttccacctaaaaattctggtatcattctcactttacttgttactttaatttctcataatctttggttgaaattatcacgcttccgcacacgatatccctacaaatttattatttgttaaacattttcaaaccgcataaaattttatgaagtcccgtctatctttaatgtagtctaacattttcatattgaaatatataatttacttaattttagcgttggtagaaagcataatgatttattcttattcttcttcatataaatgtttaatatacaatataaacaaattctttaccttaagaaggatttcccattttatattttaaaaatatatttatcaaatatttttcaaccacgtaaatctcataataataagttgtttcaaaagtaataaaatttaactccataatttttttattcgactgatcttaaagcaacacccagtgacacaactagccatttttttctttgaataaaaaaatccaattatcattgtattttttttatacaatgaaaatttcaccaaacaatcatttgtggtatttctgaagcaagtcatgttatgcaaaattctataattcccatttgacactacggaagtaactgaagatctgcttttacatgcgagacacatcttctaaagtaattttaataatagttactatattcaagatttcatatatcaaatactcaatattacttctaaaaaattaattagatataattaaaatattacttttttaattttaagtttaattgttgaatttgtgactattgatttattattctactatgtttaaattgttttatagatagtttaaagtaaatataagtaatgtagtagagtgttagagtgttaccctaaaccataaactataagatttatggtggactaattttcatatatttcttattgcttttaccttttcttggtatgtaagtccgtaactggaattactgtgggttgccatggcactctgtggtcttttggttcatgcatggatgcttgcgcaagaaaaagacaaagaacaaagaaaaaagacaaaacagagagacaaaacgcaatcacacaaccaactcaaattagtcactggctgatcaagatcgccgcgtccatgtatgtctaaatgccatgcaaagcaacacgtgcttaacatgcactttaaatggctcacccatctcaacccacacacaaacacattgcctttttcttcatcatcaccacaaccacctgtatatattcattctcttccgccacctcaatttcttcacttcaacacacgtcaacctgcatatgcgtgtcatcccatgcccaaatctccatgcatgttccaaccaccttctctcttatataatacctataaatacctctaatatcactcacttctttcatcatccatccatccagagtactactactctactactataataccccaacccaactcatattcaatactactctactatggcggatacagctagaggaacccatcacgatatcatcggcagagaccagtacccgatgatgggccgagaccgagaccagtaccagatgtccggacgaggatctgactactccaagtctaggcagattgctaaagctgcaactgctgtcacagctggtggttccctccttgttctctccagccttacccttgttggaactgtcatagctttgactgttgcaacacctctgctcgttatcttcagcccaatccttgtcccggctctcatcacagttgcactcctcatcaccggttttctttcctctggagggtttggcattgccgctataaccgttttctcttggatttacaagtaagcacacatttatcatcttacttcataattttgtgcaatatgtgcatgcatgtgttgagccagtagctttggatcaatttttttggtcgaataacaaatgtaacaataagaaattgcaaattctagggaacatttggttaactaaatacgaaatttgacctagctagcttgaatgtgtctgtgtatatcatctatataggtaaaatgcttggtatgatacctattgattgtgaataggtacgcaacgggagagcacccacagggatcagacaagttggacagtgcaaggatgaagttgggaagcaaagctcaggatctgaaagacagagctcagtactacggacagcaacatactggtggggaacatgaccgtgaccgtactcgtggtggccagcacactaccatgaacaccactccttctgcgcatgagacgatacacgaagtgatcgttattggctccggtccagcaggctacactgctgccctgtacgccgctcgtgcacagctaacaccgctggtatttgagggtacctcattcggcggcgcgctgatgaccaccaccgaggtggaaaactacccaggttttcgcaacggcataaccggcccggagttgatggacgatatgcgtgaacaggcactgcgattcggcgcggaactgcggaccgaagacgtcgagtcggtatcattgcgtggcccgatcaaatcggtcgtcaccgctgaaggacagacttatcaggcccgagccgtcatcctcgccatgggtacctccgtgcgttatctacagatccccggcgagcaagaattgctaggacgtggcgtgagtgcatgcgcgacctgcgacgggtcctttttccgcggccaagacattgccgtcattggcggtggagactcagcgatggaggaagccctctttttgacccggttcgcccgcagcgtcacgctcgtgcaccgccgcgacgaattccgagcttctaagatcatgctcggtcgcgcccgtaacaatgacaagatcaaattcatcaccaaccacaccgtggtcgcggtgaacgggtatacaacagtgaccggattgcggttgcgtaacaccacaacgggagaggaaaccacgctagtagtgaccggggtttttgttgcaattggccatgaaccacgttccagcctggtgagcgatgtcgtcgacatagacccggatggctacgtcctggtgaaaggacgtacgacgagtacatcgatggacggcgtttttgcggccggcgacctggtagatcgcacctaccggcaggcgatcactgccgcaggtagtggctgtgccgccgccatcgacgccgaacgttggttggcggagcatgccgggtcaaaagctaacgaaacaacagaggaaactggagacgttgacagtaccgacacaaccgattggagcactgcgatgactgacgccaagaacgccggggtcacaatagaagtgaccgatgcttcctttttcgcagacgtcttatccagtaataagcctgtgttagttgatttttgggcaacatggtgtggaccctgcaagatggtagcgccggtactcgaagagatcgcgtccgaacaacgaaaccagctcactgtcgccaagttagatgtagacaccaacccggaaatggcacgcgagttccaggtcgtgtcgatacccacaatgattctgttccagggtggccaaccagtaaaacgcatcgttggcgctaagggcaaagcagcgttactacgtgacctttccgacgtggtacctaacctcaattaagctttaaataagtatgaactaaaatgcatgtaggtgtaagagctcatggagagcatggaatattgtatccgaccatgtaacagtataataactgagctccatctcacttcttctatgaataaacaaaggatgttatgatatattaacactctatctatgcaccttattgttctatgataaatttcctcttattattataaatcatctgaatcgtgacggcttatggaatgcttcaaatagtacaaaaacaaatgtgtactataagactttctaaacaattctaactttagcattgtgaacgagacataagtgttaagaagacataacaattataatggaagaagtttgtctccatttatatattatatattacccacttatgtattatattaggatgttaaggagacataacaattataaagagagaagtttgtatccatttatatattatatactacccatttatatattatacttatccacttatttaatgtctttataaggtttgatccatgatatttctaatattttagttgatatgtatatgaaagggtactatttgaactctcttactctgtataaaggttggatcatccttaaagtgggtctatttaattttattgcttcttacagataaaaaaaaaattatgagttggtttgataaaatattgaaggatttaaaataataataaataataaataacatataatatatgtatataaatttattataatataacatttatctataaaaaagtaaatattgtcataaatctatacaatcgtttagccttgctggacgactctcaattatttaaacgagagtaaacatatttgactttttggttatttaacaaattattatttaacactatatgaaattttttttttttatcggcaaggaaataaaattaaattaggagggacaatggtgtgtcccaatccttatacaaccaacttccacaggaaggtcaggtcggggacaacaaaaaaacaggcaagggaaattttttaatttgggttgtcttgtttgctgcataatttatgcagtaaaacactacacataacccttttagcagtagagcaatggttgaccgtgtgcttagcttcttttattttatttttttatcagcaaagaataaataaaataaaatgagacacttcagggatgtttcaacccttatacaaaaccccaaaaacaagtttcctagcaccctaccaactaaggtacc

SEQ ID NO: 31 - protein, 118 aa, Mycobacterium leprae; identical to SEQ ID NO: 17

SEQ ID NO: 32 - protein, 513 aa, Mycobacterium leprae
YATGEHPQGSDKLDSARMKLGSKAQDLKDRAQYYGQQHTGGEHDRDRTRGGQHTTMNTTPSAHETIHEVIVIGSGPAGYTAALYAARAQLTPLVFEGTSFGGALMTTTEVENYPGFRNGITGPELMDDMREQALRFGAELRTEDVESVSLRGPIKSVVTAEGQTYQARAVILAMGTSVRYLQIPGEQELLGRGVSACATCDGSFFRGQDIAVIGGGDSAMEEALFLTRFARSVTLVHRRDEFRASKIMLGRARNNDKIKFITNHTVVAVNGYTTVTGLRLRNTTTGEETTLVVTGVFVAIGHEPRSSLVSDVVDIDPDGYVLVKGRTTSTSMDGVFAAGDLVDRTYRQAITAAGSGCAAAIDAERWLAEHAGSKANETTEETGDVDSTDTTDWSTAMTDAKNAGVTIEVTDASFFADVLSSNKPVLVDFWATWCGPCKMVAPVLEEIASEQRNQLTVAKLDVDTNPEMAREFQVVSIPTMILFQGGQPVKRIVGAKGKAALLRDLSDVVPNLN

SEQ ID NO: 33 - DNA, 4935 bp, Artificial Sequence
  CDS (1554)...(1906)
  CDS (2147)...(3701): Chimeric: Arabidopsis oleosin and thioredoxin-reductase genes and linker derived from Arabidopsis Thaliana fused with phaseolin promotor and terminator derived from Phaseolus Vulgaris.
ctgcaggaattcattgtactcccagtatcattatagtgaaagttttggctctctcgccggtggttttttacctctatttaaaggggttttccacctaaaaattctggtatcattctcactttacttgttactttaatttctcataatctttggttgaaattatcacgcttccgcacacgatatccctacaaatttattatttgttaaacattttcaaaccgcataaaattttatgaagtcccgtctatctttaatgtagtctaacattttcatattgaaatatataatttacttaattttagcgttggtagaaagcataaagatttattcttattcttcttcatataaatgtttaatatacaatataaacaaattctttaccttaagaaggatttcccattttatattttaaaaatatatttatcaaatatttttcaaccacgtaaatctcataataataagttgtttcaaaagtaataaaatttaactccataatttttttattcgactgatcttaaagcaacacccagtgacacaactagccatttttttctttgaataaaaaaatccaattatcattgtattttttttatacaatgaaaatttcaccaaacaatcatttgtggtatttctgaagcaagtcatgttatgcaaaattctataattcccatttgacactacggaagtaactgaagatctgcttttacatgcgagacacatcttctaaagtaattttaataatagttactatattcaagatttcatatatcaaatactcaatattacttctaaaaaattaattagatataattaaaatattacttttttaattttaagtttaattgttgaatttgtgactattgatttattattctactatgtttaaattgttttatagatagtttaaagtaaatataagtaatgtagtagagtgttagagtgttaccctaaaccataaactataacatttatggtggactaattttcatatatttcttattgcttttaccttttcttggtatgtaagtccgtaactagaattacagtgggttgccatggcactctgtggtcttttggttcatgcatgggtcttgcgcaagaaaaagacaaagaacaaagaaaaaagacaaaacagagagacaaaacgcaatcacacaaccaactcaaattagtcactggctgatcaagatcgccgcgtccatgtatgtctaaatgccatgcaaagcaacacgtgcttaacatgcactttaaatggctcacccatctcaacccacacacaaacacattgcctttttcttcatcatcaccacaaccacctgtatatattcattctcttccgccacctcaatttcttcacttcaacacacgtcaacctgcatatgcgtgtcatcccatgcccaaatctccatgcatgttccaaccaccttctctcttatataatacctataaatacctctaatatcactcacttctttcatcatccatccatccagagtactactactctactactataataccccaacccaactcatattcaatactactctactatggcggatacagctagaggaacccatcacgatatcatcggcagagaccagtacccgatgatgggccgagaccgagaccagtaccagatgtccggacgaggatctgactactccaagtctaggcagattgctaaagctgcaactgctgtcacagctggtggttccctccttgttctctccagccttacccttgttggaactgtcatagctttgactgttgcaacacctctgctcgttatcttcagcccaatccttgtcccggctctcatcacagttgcactcctcatcaccggttttctttcctctggagggtttggcattgccgctataaccgttttctcttggatttacaagtaagcacacatttatcatcttacttcataattttgtgcaatatgtgcatgcatgtgttgagccagtagctttggatcaatttttttggtcgaataacaaatgtaacaataagaaattgcaaattctagggaacatttggttaactaaatacgaaatttgacctagctagcttgaatgtgtctgtgtatatcatctatataggtaaaatgcttggtatgatacctattgattgtgaataggtacgcaacgggagagcacccacagggatcagacaagttggacagtgcaaggatgaagttgggaagcaaagctcaggatctgaaagacagagctcagtactacggacagcaacatactggtggggaacatgaccgtgaccgtactcgtggtggccagcacactaccatgaatggtctcgaaactcacaacacaaggctctgtatcgtaggaagtggcccagcggcacacacggcggcgatttacgcagctagggctgaacttaaacctcttctcttcgaaggatggatggctaacgacatcgctcccggtggtcaactaacaaccaccaccgacgtcgagaatttccccggatttccagaaggtattctcggagtagagctcactgacaaattccgtaaacaatcggagcgattcggtactacgatatttacagagacggtgacgaaagtcgatttctcttcgaaaccgtttaagctattcacagattcaaaagccattctcgctgacgctgtgattctcgctactggagctgtggctaagcggcttagcttcgttggatctggtgaaggttctggaggtttctggaaccgtggaatctccgcttgtgctgtttgcgacggagctgctccgatattccgtaacaaacctcttgcggtgatcggtggaggcgattcagcaatggaagaagcaaactttcttacaaaatatggatctaaagtgtatataatccataggagagatgcttttagagcgtctaagattatgcagcagcgagctttgtctaatcctaagattgatgtgatttggaactcgtctgttgtggaagcttatggagatggagaaagagatgtgcttggaggattgaaagtgaagaatgtggttaccggagatgtttctgatttaaaagtttctggattgttctttgctattggtcatgagccagctaccaagtttttggatggtggtgttgagttagattcggatggttatgttgtcacgaagcctggtactacacagactagcgttcccggagttttcgctgcgggtgatgttcaggataagaagtataggcaagccatcactgctgcaggaactgggtgcatggcagctttggatgcagagcattacttacaagagattgctggatcgaaggctaacgagaccaccgaggaaactggagatgttgactcgacggatactacggattggtcgacggctatggaagaaggacaagtgatcgcctgccacaccgttgagacatggaacgagcagcttcagaaggctaatgaatccaaaactcttgtggtggttgatttcacggcttcttggtgtggaccatgtcgtttcatcgctccattctttgctgatttggctaagaaacttcctaacgtgcttttcctcaaggttgatactgatgaattgaagtcggtggcaagtgattgggcgatacaggcgatgccaaccttcatgtttttgaaggaagggaagattttggacaaagttgttggagccaagaaagatgagcttcagtctaccattgccaaacacttggcttaagcttaaataagtatgaactaaaatgcatgtaggtgtaagagctcatggagagcatggaatattgtatccgaccatgtaacagtataataactgagctccatctcacttcttctatgaataaacaaaggatgttatgatatattaacactctatctatgcaccttattgttctatgataaatttcctcttattattataaatcatctgaatcgtgacggcttatggaatgcttcaaatagtacaaaaacaaatgtgtactataagactttctaaacaattctaactttagcattgtgaacgagacataagtgttaagaagacataacaattataatggaagaagtttgtctccatttatatattatatattacccacttatgtattatattaggatgttaaggagacataacaattataaagagagaagtttgtatccatttatatattatatactacccatttatatattatacttatccacttatttaatgtctttataaggtttgatccatgatatttctaatattttagttgatatgtatatgaaagggtactatttgaactctcttactctgtataaaggttggatcatccttaaagtgggtctatttaattttattgcttcttacagataaaaaaaaaattatgagttggtttgataaaatattgaaggatttaaaataataataaataataaataacatataatatatgtatataaatttattataatataacatttatctataaaaaagtaaatattgtcataaatctatacaatcgtttagccttgctggacgactctcaattatttaaacgagagtaaacatatttgactttttggttatttaacaaattattatttaacactatatgaaattttttttttttatcggcaaggaaataaaattaaattaggagggacaatggtgtgtcccaatccttatacaaccaacttccacaggaaggtcaggtcggggacaacaaaaaaacaggcaagggaaattttttaatttgggttgtcttgtttgctgcataatttatgcagtaaaacactacacataacccttttagcagtagagcaatggttgaccgtgtgcttagcttcttttattttatttttttatcagcaaagaataaataaaataaaatgagacacttcagggatgtttcaacccttatacaaaaccccaaaaacaagtttcctagcaccctaccaactaaggtacc

SEQ ID NO: 34 - protein, 118 aa, Arabidopsis thaliana; identical to SEQ ID NO: 17
  SITE (1)...(118)

SEQ ID NO: 35 - protein, 518 aa, Arabidopsis thaliana
  SITE (1)...(55): oleosin
  SITE (56)...(383): thioredoxin reductase
  SITE (384)...(406): linker
  SITE (407)...(518): thioredoxin
YATGEHPQGSDKLDSARMKLGSKAQDLKDRAQYYGQQHTGGEHDRDRTRGGQHTTMNGLETHNTRLCIVGSGPAAHTAAIYAARAELKPLLFEGWMANDIAPGGQLTTTTDVENFPGFPEGILGVELTDKFRKQSERFGTTIFTETVTKVDFSSKPFKLFTDSKAILADAVILATGAVAKRLSFVGSGEGSGGFWNRGISACAVCDGAAPIFRNKPLAVIGGGDSAMEEANFLTKYGSKVYIIHRRDAFRASKIMQQRALSNPKIDVIWNSSVVEAYGDGERDVLGGLKVKNVVTGDVSDLKVSGLFFAIGHEPATKFLDGGVELDSDGYVVTKPGTTQTSVPGVFAAGDVQDKKYRQAITAAGTGCMAALDAEHYLQEIAGSKANETTEETGDVDSTDTTDWSTAMEEGQVIACHTVETWNEQLQKANESKTLVVVDFTASWCGPCRFIAPFFADLAKKLPNVLFLKVDTDELKSVASDWAIQAMPTFMFLKEGKILDKVVGAKKDELQSTIAKHLA

SEQ ID NO: 36 - protein, 458 aa, Mycobacterium leprae
MNTTPSAHETIHEVIVIGSGPAGYTAALYAARAQLTPLVFEGTSFGGALMTTTEVENYPGFRNGITGPELMDDMREQALRFGAELRTEDVESVSLRGPIKSVVTAEGQTYQARAVILAMGTSVRYLQIPGEQELLGRGVSACATCDGSFFRGQDIAVIGGGDSAMEEALFLTRFARSVTLVHRRDEFRASKIMLGRARNNDKIKFITNHTVVAVNGYTTVTGLRLRNTTTGEETTLVVTGVFVAIGHEPRSSLVSDVVDIDPDGYVLVKGRTTSTSMDGVFAAGDLVDRTYRQAITAAGSGCAAAIDAERWLAEHAGSKANETTEETGDVDSTDTTDWSTAMTDAKNAGVTIEVTDASFFADVLSSNKPVLVDFWATWCGPCKMVAPVLEEIASEQRNQLTVAKLDVDTNPEMAREFQVVSIPTMILFQGGQPVKRIVGAKGKAALLRDLSDVVPNLN

SEQ ID NO: 37 - protein, 471 aa, Arabidopsis thaliana
MNGLETHNTRLCIVGSGPAAHTAAIYAARAELKPLLFEGWMANDIAPGGQLTTTTDVENFPGFPEGILGVELTDKFRKQSERFGTTIFTETVTKVDFSSKPFKLFTDSKAILADAVILATGAVAKRLSFVGSGEGSGGFWNRGISACAVCDGAAPIFRNKPLAVIGGGDSAMEEANFLTKYGSKVYIIHRRDAFRASKIMQQRALSNPKIDVIWNSSVVEAYGDGERDVLGGLKVKNVVTGDVSDLKVSGLFFAIGHEPATKFLDGGVELDSDGYVVTKPGTTQTSVPGVFAAGDVQDKKYRQAITAAGTGCMAALDAEHYLQEIAGSKANETTEETGDVDSTDTTDWSTAMEEGQVIACEEGQVIACHTVETWNEQLQKANESKTLVVVDFTASWCGPCRFIAPFFADLAKKLPNVLFLKVDTDELKSVASDWAIQAMPTFMFLKEGKILDKVVGAKKDELQSTIAKHLA

SEQ ID NO: 38 - DNA, 345 bp, Arabidopsis thaliana
  CDS (1)...(345)
atggcttcggaagaaggacaagtgatcgcctgccacaccgttgagacatggaacgagcagcttcagaaggctaatgaatccaaaactcttgtggtggttgatttcacggcttcttggtgtggaccatgtcgtttcatcgctccattctttgctgatttggctaagaaacttcctaacgtgcttttcctcaaggttgatactgatgaattgaagtcggtggcaagtgattgggcgatacaggcgatgccaaccttcatgtttttgaaggaagggaagattttggacaaagttgttggagccaagaaagatgagcttcagtctaccattgccaaacacttggcttaa

SEQ ID NO: 39 - protein, 114 aa, Arabidopsis thaliana; identical to SEQ ID NO: 15

SEQ ID NO: 40 - DNA, 999 bp, Arabidopsis thaliana; identical to SEQ ID NO: 9
  CDS (1)...(999)

SEQ ID NO: 41 - protein, 332 aa, Arabidopsis thaliana; identical to SEQ ID NO: 12

SEQ ID NO: 42 - DNA, 332 bp, E. coli
  CDS (1)...(332)
atgagcgataaaattattcacctgactgacgacagttttgacacggatgtactcaaagcggacggggctatcctcgttgatttctgggcagagtggtgcgggccgtgtaaaatgatcgctccgattctggatgaaatcgctgacgaatatcagggcaaattgaccgttgccaaactgaacattgaccagaacccaggtactgcgcctaaatatggcatccgcggtattccgactctgctgctgtttaaaaacggcgaagtggcggcaaccaaagtaggcgcactgtctaaaggtcagttgaaagagtttctcgacgccaatctggcgtaata

SEQ ID NO: 43 - protein, 109 aa, E. coli
MSDKIIHLTDDSFDTDVLKADGAILVDFWAEWCGPCKMIAPILDEIADEYQGKLTVAKLNIDQNPGTAPKYGIRGIPTLLLFKNGEVAATKVGALSKGQLKEFLDANLA

SEQ ID NO: 44 - DNA, 966 bp, E. coli
  CDS (1)...(966)
atgggcacgaccaaacacagtaaactgcttatcctgggttcaggcccggcgggatacaccgctgctgtctacgcggcgcgcgccaacctgcaacctgtgctgattaccggcatggaaaaaggcggccaactgaccaccaccacggaagtggaaaactggcctggcgatccaaacgatctgaccggtccgttattaatggagcgcatgcacgaacatgccaccaagtttgaaactgagatcatttttgatcatatcaacaaggtggatctgcaaaaccgtccgttccgtctgaatggcgataacggcgaatacacttgcgacgcgctgattattgccaccggagcttctgcacgctatctcggcctgccctctgaagaagcctttaaaggccgtggggtttctgcttgtgcaacctgcgacggtttcttctatcgcaaccagaaagttgcggtcatcggcggcggcaataccgcggttgaagaggcgttgtatctgtctaacatcgcttcggaagtgcatctgattcaccgccgtgacggtttccgcgcggaaaaaatcctcattaagcgcctgatggataaagtggagaacggcaacatcattctgcacaccaaccgtacgctggaagaagtgaccggcgatcaaatgggtgtcactggcgttcgtctgcgcgatacgcaaaacagcgataacatcgagtcactcgacgttgccggtctgtttgttgctatcggtcacagcccgaatactgcgattttcgaagggcagctggaactggaaaacggctacatcaaagtacagtcgggtattcatggtaatgccacccagaccagcattcctggcgtctttgccgcaggcgacgtgatggatcacatttatcgccaggccattacttcggccggtacaggctgcatggcagcacttgatgcggaacgctacctcgatggtttagctgacgcaaaataa

SEQ ID NO: 45 - protein, 321 aa, E. coli
MGTTKHSKLLILGSGPAGYTAAVYAARANLQPVLITGMEKGGQLTTTTEVENWPGDPNDLTGPLLMERMHEHATKFETEIIFDHINKVDLQNRPFRLNGDNGEYTCDALIIATGASARYLGLPSEEAFKGRGVSACATCDGFFYRNQKVAVIGGGNTAVEEALYLSNIASEVHLIHRRDGFRAEKILIKRLMDKVENGNIILHTNRTLEEVTGDQMGVTGVRLRDTQNSDNIESLDVAGLFVAIGHSPNTAIFEGQLELENGYIKVQSGIHGNATQTSIPGVFAAGDVMDHIYRQAITSAGTGCMAALDAERYLDGLADAK

SEQ ID NO: 46 - DNA, 318 bp, Homo Sapien
  CDS (1)...(318)
atggtgaagcagatcgagagcaagactgcttttcaggaagccttggacgctgcaggtgataaacttgtagtagttgacttctcagccacgtggtgtgggccttgcaaaatgatcaagcctttctttcattccctctctgaaaagtattccaacgtgatattccttgaagtagatgtggatgactgtcaggatgttgcttcagagtgtgaagtcaaatgcatgccaacattccagttttttaagaagggacaaaaggtgggtgaattttctggagccaataaggaaaagcttgaagccaccattaatgaattagtctaa

SEQ ID NO: 47 - protein, 105 aa, Homo Sapien
MVKQIESKTAFQEALDAAGDKLVVVDFSATWCGPCKMIKPFFHSLSEKYSNVIFLEVDVDDCQDVASECEVKCMPTFQFFKKGQKVGEFSGANKEKLEATINELV

SEQ ID NO: 48 - DNA, 1494 bp, Homo sapien
  CDS (1)...(1494)
atgaacggccctgaagatcttcccaagtcctatgactatgaccttatcatcattggaggtggctcaggaggtctggcagctgctaaggagccagcccaatatggcaagaaggtgatggtcctggactttggcactcccacccctcttggaactagatggggtcttggaggaacatgtgtgaatgtgggttgcatacctaaaaaactgatgcatcaagcagctttgttaggacaagccctgcaagactctcgaaattatggatggaaagtcgaggagacagttaagcatgattgggacagaatgatagaagctgtacagaatcacattggctctttgaattggggctaccgagtagctctgcgggagaaaaaagtcgtctatgagaatgcttatgggcaatttattggtcctcacaggattaaggcaacaaataataaaggcaaagaaaaaatttattcagcagagagatttctcattgccactggtgaaagaccacgttacttgggcatccctggtgacaaagaatactgcatcagcagtgatgatcttttctccttgccttactgcccgggtaagacactggttgttggagcatcctatgtcgctttggagtgcgctggatttcttgctggtattggtttagacgtcactgttatggttaggtccattcttcttagaggatttgaccaggacatggccaacaaaattggtgaacacatggaagaacatggcatcaagtttataagacagttcgtaccaattaaagttgaacaaattgaagcagggacaccaggccgactcagagtagtagctcagtccaccaatagtgaggaaatcattgaaggagaatataatacggtgatgctggcaataggaagagatgcttgcacaagaaaaattggcttagaaaccgtaggggtgaagataaatgaaaagactggaaaaatacctgtcacagatgaagaacagaccaatgtgccttacatctatgccattggcgatatattggaggataaggtggagctcaccccagttgcaatccaggcaggaagattgctggctcagaggctctatgcaggttccactgtcaagtgtgactatgaaaatgttccaaccactgtatttactcctttggaatatggtgcttgtggcctttctgaggagaaagctgtggagaagtttggggaagaaaatattgaggtttaccatagttacttttggccattggaatggacgattccgtcaagagataacaacaaatgttatgcaaaaataatctgtaatactaaagacaatgaacgtgttgtgggctttcacgtactgggtccaaatgctggagaagttacacaaggctttgcagctgcgctcaaatgtggactgaccaaaaagcagctggacagcacaattggaatccaccctgtctgtgcagaggtattcacaacattgtctgtgaccaagcgctctggggcaagcatcctccaggctggctgctga

SEQ ID NO: 49 - protein, 497 aa, Homo sapien [sequence omitted]

SEQ ID NO: 50 - DNA, 1377 bp, Mycobacterium leprae
  CDS (1)...(1377)
atgaacaccactccttctgcgcatgagacgatacacgaagtgatcgttattggctccggtccagcaggctacactgctgccctgtacgccgctcgtgcacagctaacaccgctggtatttgagggtacctcattcggcggcgcgctgatgaccaccaccgaggtggaaaactacccaggttttcgcaacggcataaccggcccggagttgatggacgatatgcgtgaacaggcactgcgattcggcgcggaactgcggaccgaagacgtcgagtcggtatcattgcgtggcccgatcaaatcggtcgtcaccgctgaaggacagacttatcaggcccgagccgtcatcctcgccatgggtacctccgtgcgttatctacagatccccggcgagcaagaattgctaggacgtggcgtgagtgcatgcgcgacctgcgacgggtcctttttccgcggccaagacattgccgtcattggcggtggagactcagcgatggaggaagccctctttttgacccggttcgcccgcagcgtcacgctcgtgcaccgccgcgacgaattccgagcttctaagatcatgctcggtcgcgcccgtaacaatgacaagatcaaattcatcaccaaccacaccgtggtcgcggtgaacgggtatacaacagtgaccggattgcggttgcgtaacaccacaacgggagaggaaaccacgctagtagtgaccggggtttttgttgcaattggccatgaaccacgttccagcctggtgagcgatgtcgtcgacatagacccggatggctacgtcctggtgaaaggacgtacgacgagtacatcgatggacggcgtttttgcggccggcgacctggtagatcgcacctaccggcaggcgatcactgccgcaggtagtggctgtgccgccgccatcgacgccgaacgttggttggcggagcatgccgggtcaaaagctaacgaaacaacagaggaaactggagacgttgacagtaccgacacaaccgattggagcactgcgatgactgacgccaagaacgccggggtcacaatagaagtgaccgatgcttcctttttcgcagacgtcttatccagtaataagcctgtgttagttgatttttgggcaacatggtgtggaccctgcaagatggtagcgccggtactcgaagagatcgcgtccgaacaacgaaaccagctcactgtcgccaagttagatgtagacaccaacccggaaatggcacgcgagttccaggtcgtgtcgatacccacaatgattctgttccagggtggccaaccagtaaaacgcatcgttggcgctaagggcaaagcagcgttactacgtgacctttccgacgtggtacctaacctcaattag

SEQ ID NO: 51 - protein, 458 aa, Mycobacterium leprae; identical to SEQ ID NO: 36

SEQ ID NO: 52 - protein, 178 aa, Arabidopsis thaliana
MPLSLRLSPSPTALSPTTGGFGPSRKQCRIPYSGVPTTKIGFCSLDSRKRGDSSVVRCSLETVNVSVGQVTEVDKDTFWPIVKAAGEKLVVLDMYTQWCGPCKVIAPKYKALSEKYDDVVFLKLDCNPDNRPLPKELGIRVVPTFKILKDNKVVKEVTGAKYDDLVAAIETARSAASG

SEQ ID NO: 53 - protein, 185 aa, Arabidopsis thaliana
MPLSLRLAPSPTSFRYSPITSTGAGGFSPVKQHCRIPNSGVATKIGFCSGGGGVLDSGRRIGSCVVRCSLETVNVTVGQVTEVDKDTFWPIVKAAGDKIVVLDMYTQWCGPCKVIAPKYKELSEKYQDMVFLKLDCNQDNKPLAKELGIRVVPTFKILKDNKVVKEVTGAKYEDLLAAIEAARSG

SEQ ID NO: 54 - protein, 182 aa, Brassica napus
MPLSLRLAPSPTALSPTTGGFSPAKKQCRIPSYSGVATTTRRIGLCSLDYVKRGDSSVVRCSLQTVNVSVGQVTEVDKDTFWPIVKAAGEKIVVLDMYTQWCGPCKVIAPKYKALSEKYEDVVFLKLDCNPENRPLAKELGIRVVPTFKILKDNQVVKEVTGAKYDDLVAAIETARSASSSG

SEQ ID NO: 55 - protein, 191 aa, Mesembryanthemum crystallinum
MAMQLSLSHQSWAKSLASPITSFDPARSPPKRVELGPNCLNGGATAGKLMREKVGERMRMSGRSCCVKASLETAVGAESETLVGKVTEVDKDTFWPIANGAGDKPVVLDMYTQWCGPCKVMAPKYQELAEKLLDVVFLKLDCNQENKPLAKELGIRVVPTFKILKGGKIVDEVTGAKFDKLVAAIEAARSS

SEQ ID NO: 56 - protein, 182 aa, Pisum sativum
MALNLCTSPKWIGTTVFDSASSSKPSLASSFSTTSFSSSILCSKRVGLQRLSLRRSISVSVRSSLETAGPTVTVGKVTEVNKDTFWPIVNAAGDKTVVLDMFTKWCGPCKVIAPLYEELSQKYLDVVFLKLDCNQDNKSLAKELGIKVVPTFKILKDNKIVKEVTGAKFDDLVAAIDTVRSS

SEQ ID NO: 57 - protein, 190 aa, Spinacia oleracea
MALHLSLSHQSWTSPAHPITSSDPTRSSVPGTGLSRRVDFLGSCKINGVFVVKRKDRRRMRGGEVRASMEQALGTQEMEAIVGKVTEVNKDTFWPIVKAAGDKPVVLDMFTQWCGPCKAMAPKYEKLAEEYLDVIFLKLDCNQENKTLAKELGIRVVPTFKILKENSVVGEVTGAKYDKLLEAIQAARSS

SEQ ID NO: 58 - protein, 106 aa, Anabaena
SAAAQVTDSTFKQEVLDSDVPVLVDFWAPWCGPCRMVAPVVDEIAQQYEGKIKVVKVNTDENPQVASQYGIRSIPTLMIFKGGQKVDMVVGAVPKTTLSQTLEKHL

SEQ ID NO: 59 - protein, 179 aa, Arabidopsis thaliana
MAAYTCTSRPPISIRSEMRIASSPTGSFSTRQMFSVLPESSGLRTRVSLSSLSKNSRVSRLRRGVICEAQDTATGIPVVNDSTWDSLVLKADEPVFVDFWAPWCGPCKMIDPIVNELAQKYAGQFKFYKLNTDESPATPGQYGVRSIPTIMIFVNGEKKDTIIGAVSKDTLATSINKFL

SEQ ID NO: 60 - protein, 186 aa, Arabidopsis thaliana
MAAFTCTSRPPISLRSETRIVSSSPSASSLSSRRMFAVLPESSGLRIRLSLSPASLTSIHQPRVSRLRRAVVCEAQETTTDIQVVNDSTWDSLVLKATGPVVVDFWAPWCGPCKMIDPLVNDLAQHYTGKIKFYKLNTDESPNTPGQYGVRSIPTIMIFVGGEKKDTIIGAVPKTTLTSSLDKFLP

SEQ ID NO: 61 - protein, 173 aa, Arabidopsis thaliana
MAISSSSSSICFNPTRFHTARHISSPSRLFPVTSFSPRSLRFSDRRSLLSSSASRLRLSPLCVRDSRAAEVTQRSWEDSVLKSETPVLVEFYTSWCGPCRMVHRIIDEIAGDYAGKLNCYLLNADNDLPVAEEYEIKAVPVVLLFKNGEKRESIMGTMPKEFYISAIERVLNS

SEQ ID NO: 62 - protein, 193 aa, Arabidopsis thaliana
MASLLDSVTVTRVFSLPIAASVSSSSAAPSVSRRRISPARFLEFRGLKSSRSLVTQSASLGANRRTRIARGGRIACEAQDTTAAAVEVPNLSDSEWQTKVLESDVPVLVEFWAPWCGPCRMIHPIVDQLAKDFAGKFKFYKINTDESPNTPNRYGIRSVPTVIIFKGGEKKDSIIGAVPRETLEKTIERFLVE

SEQ ID NO: 63 - protein, 177 aa, Brassica napus
MAAFTCTSSPPISLRSEMMIASSKTVSLSTRQMFSVGGLRTRVSLSSVSKNSRASRLRRGGIICEAQDTATGIPMVNDSTWESLVLKADEPVVVDFWAPWCGPCKMIDPIVNELAQQYTGKIKFFKLNTDDSPATPGKYGVRSIPTIMIFVKGEKKDTIIGAVPKTTLATSIDKFLQ

SEQ ID NO: 64 - protein, 140 aa, Chlamydomonas reinhardtii
MALVARRAAVPSARSSARPAFARAAPRRSVVVRAEAGAVNDDTFKNVVLESSVPVLVDFWAPWCGPCRIIAPVVDEIAGEYKDKLKCVKLNTDESPNVASEYGIRSIPTIMVFKGGKKCETIIGAVPKATIVQTVEKYLN

SEQ ID NO: 65 - protein, 167 aa, Zea mays
MAMETCFRAWALHAPAGSKDRLLVGNLVLPSKRALAPLSVGRVATRRPRHVCQSKNAVDEVVVADEKNWDGLVMACETPVLVEFWAPWCGPCRMIAPVIDELAKDYAGKITCCKVNTDDSPNVASTYGIRSIPTVLIFKGGEKKESVIGAVPKSTLTTLIDKYIGSS

SEQ ID NO: 66 - protein, 172 aa, Oryza sativa
MALETCFRAWATLHAPQPPSSGGSRDRLLLSGAGSSQSKPRLSVASPSPLRPASRFACQCSNVVDEVVVADEKNWDSMVLGSEAPVLVEFWAPWCGPCRMIAPVIDELAKEYVGKIKCCKVNTDDSPNIATNYGIRSIPTVLMFKNGEKKESVIGAVPKTTLATIIDKYVSS

SEQ ID NO: 67 - protein, 172 aa, Pisum sativum
MALESLFKSIHTKTSLSSSIVFIFKGKACLLTSKSRIQESFAELNSFTSLVLLIENHVLLHAREAVNEVQVVNDSSWDELVIGSETPVLVDFWAPWCGPCRMIAPIIDELAKEYAGKIKCYKLNTDESPNTATKYGIRSIPTVLFFKNGERKDSVIGAVPKATLSEKVEKYI

SEQ ID NO: 68 - protein, 181 aa, Spinacia oleracea
MAIENCLQLSTSASVGTVAVKSHVHHLQPSSKVNVPTFRGLKRSFPALSSSVSSSSPRQFRYSSVVCKASEAVKEVQDVNDSSWKEFVLESEVPVMVDFWAPWCGPCKLIAPVIDELAKEYSGKIAVYKLNTDEAPGIATQYNIRSIPTVLFFKNGERKESIIGAVPKSTLTDSIEKYLSP

SEQ ID NO: 69 - protein, 175 aa, Triticum aestivum
MALETCLRGWALYAPQAGIRERLSSGSYAPSRPRTAAPAVVSPSPYKSALVAARRPSRFVCKCKNVVDEVIVADEKNWDNMVIACESPVLVEFWAPWCGPCRMIAPVIDELAKDYVGKIKCCKVNTDDCPNIASTYGIRSIPTVLMFKDGEKKESVIGAVPKTTLCTIIDKYIGS

SEQ ID NO: 70 - protein, 106 aa, Anacystis nidulans
SVAAAVTDATFKQEVLESSIPVLVDFWAPWCGPCRMVAPVVDEIAQQYSDQVKVVKVNTDENPSVASQYGIRSIPTLMIFKDGQRVDTVVGAVPKTTLANTLDKHL

SEQ ID NO: 71 - protein, 107 aa, Cyanidium caldarium
MPSPIQVTDFSFEKEVVNSEKLVLVDFWAPWCGPCRMISPVIDELAQEYVEQVKIVKINTDENPSISAEYGIRSIPTLMLFKDGKRVDTVIGAVPKSTLTNALKKYL

SEQ ID NO: 72 - protein, 102 aa, Cyanidioschyzon merolae
MLHIDELTFENEVLQSEKLVLVDFWAPWCGPCRMIGPILEEIAKEFNLKVVQVNTDENPNLATFYGIRSIPTLMLFKKGQRVDTVIGAVPKSILIHTINKYL

SEQ ID NO: 73 - protein, 109 aa, Griffithsia pacifica
MSISQVIDTSFHEEVINSRQPVLVDFWAPWCGPCRMIASTIDEIAHDYKDKLKVVKVNTDQNPTIATEYGIRSIPTVMIFINGKKVDTVVGAVPKLTLLNTLQKHLKST

SEQ ID NO: 74 - protein, 107 aa, Porphyra yezoensis
MSVSQVTDASFKQEVINNNLPVLVDFWAPWCGPCRMVSPVVDEIAEEYESSIKVVKINTDDNPTIAAEYGIRSIPTLMIFKAGERVDTVIGAVPKSTLASTLNKYIS

SEQ ID NO: 75 - protein, 107 aa, Porphyra purpurea
MSVSQVTDASFKQEVINNDLPVLVDFWAPWCGPCRMVSPVVDAIAEEYESSIKVVKINTDDNPTIAAEYGIRSIPTLMIFKSGERVDTVIGAVPKSTLESTLNKYIS

SEQ ID NO: 76 - protein, 114 aa, Arabidopsis thaliana; identical to SEQ ID NO: 15

SEQ ID NO: 77 - protein, 110 aa, Anabaena
SKGVITITDAEFESEVLKAEQPVLVYFWASWCGPCQLMSPLINLAANTYSDRLKVVKLEIDPNPTTVKKYKVEGVPALRLVKGEQILDSTEGVISKDKLLSFLDTHLNNN

SEQ ID NO: 78 - protein, 123 aa, Brassica napus
MAATAEVIPAGEVIACHTVEDWNNKLKAAKESNKLIVIDFTAVWCPPCRFIAPIFVELAKKHLDVVFFKVDVDELATVAQEFDVQAMPTFVYMKGEEKLDKVVGAAKEEIEAKLLKHSQVAAA

SEQ ID NO: 79 - protein, 126 aa, Nicotiana tabacum
MAANDATSSEEGQVFGCHKVEEWNEYFKKGVETKKLVVVDFTASWCGPCRFIAPILADIAKKMPHVIFLKVDVDELKTVSAEWSVEAMPTFVFIKDGKEVDRVVGAKKEELQQTIVKHAAPATVTA

SEQ ID NO: 80 - protein, 133 aa, Arabidopsis thaliana
MGGALSTVFGSGEDATAAGTESEPSRVLKFSSSARWQLHFNEIKESNKLLVVDFSASWCGPCRMIEPAIHAMADKFNDVDFVKLDVDELPDVAKEFNVTAMPTFVLVKRGKEIERIIGAKKDELEKKVSKLRA

SEQ ID NO: 81 - protein, 119 aa, Brassica napus
MAAEEGQVIGCHEIDVWAVQLDTAKQSNKLIVIDFTASWCPPCRMIAPVFADLAKKFMSSAIFFKVDVDELQNVAQEFGVEAMPTFVLIKDGNVVDKVVGARKEDLHATIAKHTGVATA

SEQ ID NO: 82 - protein, 118 aa, Nicotiana tabacum
MAEEGQVIGVHTVDAWNEHLQKGIDDKKLIVVDFTASWCGPCKFIASFYAELAKKMPTVTFLKVDVDELKSVATDWAVEAMPTFMFLKEGKIVDKVVGAKKDELQQTIAKHISSTSTA

SEQ ID NO: 83 - protein, 118 aa, Arabidopsis thaliana
MAAEGEVIACHTVEDWTEKLKAANESKKLIVIDFTATWCPPCRFIAPVFADLAKKHLDVVFFKVDVDELNTVAEEFKVQAMPTFIFMKEGEIKETVVGAAKEEIIANLEKHKTVVAAA

SEQ ID NO: 84 - protein, 125 aa, Arabidopsis thaliana
MAAEEGQVIGCHTNDVWTVQLDKAKESNKLIVIDFTASWCPPCRMIAPIFNDLAKKFMSSAIFFKVDVDELQSVAKEFGVEAMPTFVFIKAGEVVDKLVGANKEDLQAKIVKHTGVTTVVNQFEA

SEQ ID NO: 85 - protein, 118 aa, Arabidopsis thaliana
MAGEGEVIACHTLEVWNEKVKDANESKKLIVIDFTASWCPPCRFIAPVFAEMAKKFTNVVFFKIDVDELQAVAQEFKVEAMPTFVFMKEGNIIDRVVGAAKDEINEKLMKHGGLVASA

SEQ ID NO: 86 - protein, 123 aa, Brassica rapa
MAATAELIPAGEVIACHTVEDWNNKLKAAKESNKLIVIDFTAVWCPPCRFIAPIFVELAKKHLDVVFFKVDVDELATVAKEFDVQAMPTFVYMKGEEKLDKVVGAAKEEIEAKLLKHSQVAAA

SEQ ID NO: 87 - protein, 112 aa, Chlamydomonas reinhardtii
GGSVIVIDSKAAWDAQLAKGKEEHKPIVVDFTATWCGPCKMIAPLFETLSNDYAGKVIFLKVDVDAVAAVAEAAGITAMPTFHVYKDGVKADDLVGASQDKLKALVAKHAAA

SEQ ID NO: 88 - protein, 116 aa, Fagopyrum esculentum
MAEEAQVIACHTVQEWNEKFQKAKDSGKLIVIDFTASWCGPCRVITPYVSELAKKFPHVAFFKVDVDDLKDVAEEYKVEAMPSFVILKEGQEVERIVGARKDELLHKIAVHAPITA

SEQ ID NO: 89 - protein, 122 aa, Oryza sativa
MAAEEGVVIACHNKDEFDAQMTKAKEAGKVVIIDFTASWCGPCRFIAPVFAEYAKKFPGAVFLKVDVDELKEVAEKYNVEAMPTFLFIKDGAEADKVVGARKDDLQNTIVKHVGATAASASA

SEQ ID NO: 90 - protein, 125 aa, Picea mariana
MAEGNVFACHSTEGWRSKLQEAIDTKRLVAVDFTATWCGPCRVIGPVFVELSKKFPEIFFLKVDVDELRDVAQEWDVEAMPTFIFIKDGKAVDKVVGAKKDDLERKVAALAAAATTTEATLPAQA

SEQ ID NO: 91 - protein, 118 aa, Ricinus communis
MAAEEGQVIGCHTVEAWNEQLQKGNDTKGLIVVDFTASWCGPCRFIAPFLAELAKKLPNVTFLKVDVDELKTVAHEWAVESMPTFMFLKEGKIMDKVVGAKKDELQQTIAKHMATAST

SEQ ID NO: 92 - protein, 126 aa, triticum aestivum
AASAATATATAAAVGAGEVISVHSLEQWTMQIEEANAAKKLVVIDFTASWCGPCRIMAPIFADLAKKFPAAVFLKVDVDELKPIAEQFSVEAMPTFLFMKEGDVKDRVVGAIKEELTTKVGLHAAQ

SEQ ID NO: 93 - protein, 109 aa, Aspergillus nidulans
GASEHVPPITSKAEFQEKVLNAKGFVVVDCFATWCGPCKAIAPTVEKFAQTYTDASFYQIDVDELSEVAAELGIRAMPTFLLFKDGQKVSDVVGANPGALEAGIKALLA

SEQ ID NO: 94 - protein, 105 aa, Alicyclobacillus
ATMTLTDANFQQAIQGDKPVLVDFWAAWCGPCRMMAPVLEEFAEAHADKVTVAKLNVDENPETTSQFGIMSIPTLILFKGGRPVKQLIGYQPKEQLEAQLADVLQ

SEQ ID NO: 95 - protein, 91 aa, Archaeoglobus fulgidus
MVMMKLFTSPTCPYCPKAEKVVSKVAKEEGVLAINLPVNTDEGLKEALKFGIRGVPALVINDKYLILGVPDEGELRQLIRKLKGGEEYGAS

SEQ ID NO: 96 - protein, 103 aa, Bacillus subtilis
AIVKATDQSFSAETSEGVVLADFWAPWCGPCKMIAPVLEELDQEMGDKLKIVKIDVDENQETAGKYGVMSIPTLLVLKDGEVVETSVGFKPKEALQELVNKHL

SEQ ID NO: 97 - protein, 87 aa, Bacteriophage T4
MFKVYGYDSNIHKCVYCDNAKRLLTVKKQPFEFINIMPEKGVFDDEKIAELLTKLGRDTQIGLTMPQVFAPDGSHIGGFDQLREYFK

SEQ ID NO: 98 - protein, 117 aa, Borrelia burgdorferi
MAISLTEEDFVVKVFDYKNDKEWSFRGDRPAIIDFYANWCGPCKMLSPIFEKLSKKYENSIDFYKVDTDKEQDISSAIGVQSLPTILFIPVDGKPKVSVGFLQEDAFENIIKDFFGF

SEQ ID NO: 99 - protein, 108 aa, Buchnera aphidicola
MNKIIELTDQNFEEQVLNSKSFFLVDFWAQWCNPCKILAPILEEISKEYSNKVIVGKLNIEENPNTAPVYSIRSIPTLLLFNNSEVLATKVGAVSKLELKEFLDENIN

SEQ ID NO: 100 - protein, 108 aa, aphidicola
MNKIIELTDQNFEKEVLEHKSFVLVDFWAEWCNPCKILAPILEEIAQEYFNKIKVGKLNIEKNPNTAPIYSIRGIPALLLFHGREVLATKVGAISKLQLKDFLDENIK

SEQ ID NO: 101 - protein, 108 aa, Chlorobium limicola
  VARIANT 16, 17, 38, 42, 45, 54, 55, 58, 66, 72, 75, 79, 80, 81, 94,99, 103: Xaa = Any Amino Acid
AGKYFEATDKNFQTEXXDSDKAVLVDFWASWCGPCMMXGPVXEQXADDYEGKAXXAKXNVDENPNXAGQYGXRSXPTMXXXKGGKVVDQMVGAXPKNMXAKKXDEHIG

SEQ ID NO: 102 - protein, 102 aa, Chlamydia muridarum
MVQIVSQDNFADSIASGLVLVDFFAEWCGPCKMLTPVLEALAAELPYVTILKLDIDASPRPAEQFGVSSIPTLILFKDGKEVERSVGLKDKDSLVKLISKHQ

SEQ ID NO: 103 - protein, 102 aa, Chlamydia pneumoniae
MVKIISSENFDSFIASGLVLVDFFAEWCGPCRMLTPILENLAAELPHVTIGKINIDENSKPAETYEVSSIPTLILFKDGNEVARVVGLKDKEFLTNLINKHA

SEQ ID NO: 104 - protein, 102 aa, Psittaci
MVKVVSAENFNSFIATGLVLIDFFAEWCGPCKMLTPVLESLEAEVSSVLIGKVNIDDHPAPAEQYGVSSIPTLILFKDGKEVDRVVGLKDKDSLIRLINQHS

SEQ ID NO: 105 - protein, 102 aa, Chlamydia trachomatis
MVQVVSQENFADSIASGLVLIDFFAEWCGPCKMLTPVLEALAAELPHVTILKVDIDSSPRPAEQYSVSSIPTLILFKDGKEVERSVGLKDKDSLIKLISKHQ

SEQ ID NO: 106 - protein, 105 aa, Cornybacterium nephridii
ATVKVDNSNFQSDVLQSSEPVVVDFWAEWCGPCKMIAPALDEIATEMAGQVKIAKVNIDENPELAAQFGVRSIPTLLMFKDGELAANMVGAAPKSRLADWIKASA

SEQ ID NO: 107 - protein, 107 aa, Cornybacterium nephridii
SATIVNTTDENFQADVLDAETPVLVDFWAGWCAPCKAIAPVLEELSNEYAGKVKIVKVDVTSCEDTAVKYNIRNIPALLMFKDGEVVAQQVGAAPRSKLAAFIDQNI

SEQ ID NO: 108 - protein, 145 aa, Cornybacterium nephridii
MIIVCASCGAKNRVPEEKLAVHPNCGQCHQALLPLEPIELNEQNFSNFISNSDLPVLIDLWAEWCGPCKMMAPHFAQVAKQNPYVVFAKIDTEANPRLSAAFNVRSIPTLVLMNKTTEVARISGALRTLELQQWLDQQLQQQQGN

SEQ ID NO: 109 - protein, 107 aa, Chromatium vinosum
  VARIANT 17, 38, 42, 55, 58, 60, 72, 107: Xaa = Any Amino Acid
SDSIVHVTDDSFEEEVXKSPDPVLVDYWADWCGPCKMXAPVXDEIADEYAGRVKXAKXNXDENPNTPPRYGXRGIPTLMLFRGGEVEATKVGAVSKSQLTAFLDSNX

SEQ ID NO: 110 - protein, 107 aa, Clostridium litorale
MLMLDKDTFKTEVLEGTGYVLVDYFSDGCVPCKALMPAVEELSKKYEGRVVFAKLNTTGARRLAISQKILGLPTLSLYKDGVKVDEVTKDDATIENIEAMVEEHISK

SEQ ID NO: 111 - protein, 40 aa, Clostridium sporogenes
MLVLDKKTFEEEVLKTKGYVLVDYFGDGCVPCEALMPDVE

SEQ ID NO: 112 - protein, 33 aa, Clostridium sticklandii
MFELDKDTFETEVLQGTGYVLVDFWSEGCEPCK

SEQ ID NO: 113 - protein, 106 aa, Coprinus comatus
MVQVISNLDEFNKLTNSGKIIIIDFWATWCGPCRVISPIFEKFSEKYGANNIVFAKVDVDTASDISEEAKIRAMPTFQVYKDGQKIDELVGANPTALESLVQKSLA

SEQ ID NO: 114 - protein, 105 aa, Dictyostelium discoideum
MSNRVIHVSSCEELDKHLRDERVVVDFSAVWCGPCRAISPVFEKLSNEFITFTFLHVDIDKLNVHPIVSKIKSVPTFHFYRNGSKVSEFSGASESILRSTLEANK

SEQ ID NO: 115 - protein, 88 aa, Dictyostelium discoideum
MSRVIHISSNEELDKHLQAERLVIDFSAAWCGPCRAISPVFEKLSNEFVTFTFVHVDIDKLSGHPIVKEIRSVPTFYFYRNGAKVSEF

SEQ ID NO: 116 - protein, 88 aa, Dictyostelium discoideum; identical to SEQ ID NO: 115

SEQ ID NO: 117 - protein, 108 aa, E coli, salmonella typhimurium
SDKIIHLTDDSFDTDVLKADGAILVDFWAEWCGPCKMIAPILDEIADEYQGKLTVAKLNIDQNPGTAPKYGIRGIPTLLLFKNGEVAATKVGALSKGQLKEFLDANLA

SEQ ID NO: 118 - protein, 105 aa, Synechocystis
MAVKKQFANFAEMLAGSPKPVLVDFYATWCGPCQMMAPILEQVGSHLRQQIQVVKIDTDKYPAIATQYQIQSLPTLVLFKQGQPVHRMEGVQQAAQLIQQLQVFV

SEQ ID NO: 119 - protein, 139 aa, E. coli
MNTVCTHCQAINRIPDDRIEDAAKCGRCGHDLFDGEVINATGETLDKLLKDDLPVVIDFWAPWCGPCRNFAPIFEDVAQERSGKVRFVKVNTEAERELSSRFGIRSIPTIMIFKNGQVVDMLNGAVPKAPFDSWLNESL

SEQ ID NO: 120 - protein, 110 aa, Eubacterium acidaminophilum
MSALLVEIDKDQFQAEVLEAEGYVLVDYFSDGCVPCKALMPDVEELAAKYEGKVAFRKFNTSSARRLAISQKILGLPTITLYKGGQKVEEVTKDDATRENIDAMIAKHVG

SEQ ID NO: 121 - protein, 107 aa, Haemophilus influenzae
MSEVLHINDADFESVVVNSDIPILLDFWAPWCGPCKMIAPVLDELAPEFAGKVKIVKMNVDDNQATPAQFGVRSIPTLLLIKNGQVVATQVGALPKTQLANFINQHI

SEQ ID NO: 122 - protein, 167 aa, Haemophilus influenzae
MKIKKLLKNGLSLFLTFIVITSILDFVRRPVVPEEINKITLQDLQGNTFSLESLDQNKPTLLYFWGTWCGYCRYTSPAINSLAKEGYQVVSVALRSGNEADVNDYLSKNDYHFTTVNDPKGEFAERWQINVTPTIVLLSKGKMDLVTTGLTSYWGLKVRLFFAEFFG

SEQ ID NO: 123 - protein, 106 aa, Helicobacter pylori
MSHYIELTEENFESTIKKGVALVDFWAPWCGPCKMLSPVIDELASEYEGKAKICKVNTDEQEELSAKFGIRSIPTLLFTKDGEVVHQLVGVQTKVALKEQLNKLLG

SEQ ID NO: 124 - protein, 103 aa, Listeria monocytogenes
MVKEITDATFEQETSEGLVLTDFWATWCGPCRMVAPVLEEIQEERGEALKIVKMDVDENPETPGSFGVMSIPTLLIKKDGEVVETIIGYRPKEELDEVINKYV

SEQ ID NO: 125 - protein, 85 aa, Methoanococus jannaschii
MSKVKIELFTSPMCPHCPAAKRVVEEVANEMPDAVEVEYINVMENPQKAMEYGIMAVPTIVINGDVEFIGAPTKEALVEAIKKRL

SEQ ID NO: 126 - protein, 102 aa, Mycoplasma genitalium
MVTEIRSLKQLEEIFSAKKNVIVDFWAAWCGPCKLTSPEFQKAADEFSDAQFVKVNVDDHTDIAAAYNITSLPTIVVFENGVEKKRAIGFMPKTKIIDLFNN

SEQ ID NO: 127 - protein, 458 aa, mycobacterium leprae; identical to SEQ ID NO: 36

SEQ ID NO: 128 - protein, 102 aa, Mycoplasma pneumoniae
MVTEIKSLKQLGELFASNNKVIIDFWAEWCGPCKITGPEFAKAASEVSTVAFAKVNVDEQTDIAAAYKITSLPTIVLFEKGQEKHRAIGFMPKAKIVQLVSQ

SEQ ID NO: 129 - protein, 112 aa, Mycobacterium smegmatis
MSEDSATVAVTDDSFSTDVLGSSKPVLVDFWATWCGPCKMVAPVLEEIAAEKGDQLTVAKIDVDVDANPATARDFQVVSIPTMILFKDGAPVKRIVGAKGKAALLRELSDAL

SEQ ID NO: 130 - protein, 115 aa, Mycobacterium tuberculosis
TDSEKSATIKVTDASFATDVLSSNKPVLVDFWATWCGPCKMVAPVLEEIATERATDLTVAKLDVDTNPETARNFQVVSIPTLILFKDGQPVKRIVGAKGKAALLRELSDVVPNLN

SEQ ID NO: 131 - protein, 127 aa, Neurospora crassa
MSDGVKHINSAQEFANLLNTTQYVVADFYADWCGPCKAIAPMYAQFAKTFSIPNFLAFAKINVDSVQQVAQHYRVSAMPTFLFFKNGKQVAVNGSVMIQGADVNSLRAAAEKMGRLAKEKAAAAGSS

SEQ ID NO: 132 - protein, 106 aa, Penicillium chrysogenum
MGVTPIKSVAEYKEKVTDATGPVVVDFHATWCGPCKAIAPALEKLSETHTGIQFYKVDVDELSEVAASNGVSAMPTFHFYKGGERNEEVKGANPAAIQAGVKAILE

SEQ ID NO: 133 - protein, 108 aa, Pseudomonas aeruginosa
MSEHIVNVTDASFEQDVLKADGPVLVDYWAEWCGPCKMIAPVLDEVARDYQGKLKVCKLNIDENQDTPPKYGVRGIPTLMLFKDGNVEATKVGALSKSQLAAFLDANI

SEQ ID NO: 134 - protein, 104 aa, Rhodospirillum rubrum
  VARIANT 21, 35: Xaa = Any Amino Acid
MKQVSDASFEEDVLKADGPNXVDFWAEWCGPCRQXAPALEELATALGDKVTVAKINIDENPQTPSKYGVRGIPTLMIFKDGQVAATKIGALPKTKLFEWVEASV

SEQ ID NO: 135 - protein, 105 aa, Rhodobacter sphaeroides
STVPVTDATFDTEVRKSDVPVVVDFWAEWCGPCRQIGPALEELSKEYAGKVKIVKVNVDENPESPAMLGVRGIPALFLFKNGQVVSNKVGAAPKAALATWIASAL

SEQ ID NO: 136 - protein, 130 aa, Rickettsia prowazekii
MSCYNEITTLLEFDSNDINTTQRINMVNNVTDSSFKNEVLESDLPVMVDFWAEWCGPCKMLIPIIDEISKELQDKVKVLKMNIDENPKTPSEYGIRSIPTIMLFKNGEQKDTKIGLQQKNSLLDWINKSI

SEQ ID NO: 137 - protein, 106 aa, Streptomyces aureofaciens
GATVKVTNATFKSDVLESDKPVLVHFEGPWCGPCKMVAPVLDEIANEYEGKVKVAKVNTDENPQLASQYGVRSIPTRLMFKGGEVAANMVGAAPKTRLAAFLDASL

SEQ ID NO: 138 - protein, 110 aa, Streptomyces coelicolor
MAGTLKHVTDDSFEQDVLKNDKPVLVDFWAAWCGPCRQIAPSLEAIAAEYGDKIEIVKLNIDENPGTAAKYGVMSIPTLNVYQGGEVAKTIVGAKPKAAIVRDLEDFIAD

SEQ ID NO: 139 - protein, 107 aa, Streptomyces clavuligerus
MAGVLKNVTDDTFEADVLKSEKPVLVDFWAEWCGPCRQIAPSLEAITEHGGQIEIVKLNIDQNPATAAKYGVMSIPTLNVYQGGEVVKTIVGAKPKAALLRPGPVPR

SEQ ID NO: 140 - protein, 106 aa, Synechocystis
SATPQVSDASFKEDVLDSELPVLVDFWAPWCGPCRMVAPVVDEISQQYEGKVKVVKLNTDENPNTASQYGIRSIPTLMIFKGGQRVDMVVGAVPKTTLASTLEKYL

SEQ ID NO: 141 - protein, 109 aa, Synechocystis
MSLLEITDAEFEQETQGQTKPVLVYFWASWCGPCRLMAPAIQAIAKDYGDKLKVLKLEVDPNPAAVAQCKVEGVPALRLFKNNELVMTHEGAIAKPKLLELLKEELDFI

SEQ ID NO: 142 - protein, 108 aa, Thiobacillus ferrooxidans
MSDAILYVSDDSFETDVLKSSKPVLVDFWAEWCGPCKMIAPILEEIADEYADRLRVAKFNIDENPNTPPQYAIRGIPTLLLFKAGKLEATKVGALSKAQLTAFLDSQL

SEQ ID NO: 143 - protein, 91 aa, Thiocapsa roseopersicina
MSDSIVHVTDDSFEDEVLKSLEPVLVDYWADWCGPCKMIAPVLDEIAGEYAGRIKVAKLNIDENPNTPRRYGIRGIPTLMLSRQSEVEATK

SEQ ID NO: 144 - protein, 44 aa, Tissierella creatinophila
MIELDKSNFEEEVLKAEGTVLVDFWSPSCEPCKALMPHVHDFEE

SEQ ID NO: 145 - protein, 105 aa, Treponema pallidum
MALLDISSGNVRKTIETNPLVIVDFWAPWCGSCKMLGPVLEEVESEVGSGVVIGKLNVDDDQDLAVEFNVASIPTLIVFKDGKEVDRSIGFVDKSKILTLIQKNA

SEQ ID NO: 146 - protein, 104 aa, Bos taurus
VKQIESKYAFQEALNSAGEKLVVVDFSATWCGPCKMIKPFFHSLSEKYSNVVFLEVDVDDCQDVAAECEVKCMPTFQFFKKGQKVGEFSGANKEKLEATINELI

SEQ ID NO: 147 - protein, 166 aa, Bos taurus
MAQRLLLRRFLTSIISGKPSQSRWAPVASRALKTPQYSPGYLTVTPSQARSIYTTRVCSTTFNIQDGPDFQDRVVNSETPVVVDFHAQWCGPCKILGPRLEKVVAKQHGKVVMAKVDIDDHTDLALEYEVSAVPTVLAMKNGDVVDKFVGIKDEDQLEAFLKKLIG

SEQ ID NO: 148 - protein, 115 aa, Caenorhabditis elegans
MLKRCNFKNQVKYFQSDFEQLIRQHPEKIIILDFYATWCGPCKAIAPLYKELATTHKGIIFCKVDVDEAEDLCSKYDVKMMPTFIFTKNGDAIEALEGCVEDELRQKVLEHVSAQ

SEQ ID NO: 149 - protein, 20 aa, Canis familiaris
VKQIEFKYAFQEALNSAGDK

SEQ ID NO: 150 - protein, 104 aa, Gallus gallus
VKSVGNLADFEAELKAAGEKLVVVDFSATWCGPCKMIKPFFHSLCDKFGDVVFIEIDVDDAQDVATHCDVKCMPTFQFYKNGKKVQEFSGANKEKLEETIKSLV

SEQ ID NO: 151 - protein, 107 aa, Drosophila melanogaster
MASVRTMNDYHKRIEAADDKLIVLDFYATWCGPCKEMESTVKSLARKYSSKAVVLKIDVDKFEELTERYKVRSMPTFVFLRQNRRLASFAGADEHKLTNMMAKLVKA

SEQ ID NO: 152 - protein, 104 aa, Homo sapien
VKQIESKTAFQEALDAAGDKLVVVDFSATWCGPCKMIKPFFHSLSEKYSNVIFLEVDVDDCQDVASECEVKCMPTFQFFKKGQKVGEFSGANKEKLEATINELV

SEQ ID NO: 153 - protein, 166 aa, Homo sapien
MAQRLLLRRFLASVISRKPSQGQWPPLTSKALQTPQCSPGGLTVTPNPARTIYTTRISLTTFNIQDGPDFQDRVVNSETPVVVDFHAQWCGPCKILGPRLEKMVAKQHGKVVMAKVDIDDHTDLAIEYEVSAVPTVLAMKNGDVVDKFVGIKDEDQLEAFLKKLIG

SEQ ID NO: 154 - protein, 104 aa, Macaca mulatta
VKQIESKAAFQEALDDAGDKLVVVDFSATWCGPCKMIKPFFHSLSEKYSNVVFLEVDVDDCQDVASECEVKCMPTFQFFKKGQKVGEFSGANKEKLEATINELV

SEQ ID NO: 155 - protein, 104 aa, Mus musculus
VKLIESKEAFQEALAAAGDKLVVVDFSATWCGPCKMIKPFFHSLCDKYSNVVFLEVDVDDCQDVAADCEVKCMPTFQFYKKGQKVGEFSGANKEKLEASITEYA

SEQ ID NO: 156 - protein, 166 aa, Mus musculus
MAQRLLLGRFLTSVISRKPPQGVWASLTSKTLQTPQYNAGGLTVMPSPARTVHTTRVCLTTFNVQDGPDFQDRVVNSETPVVVDFHAQWCGPCKILGPRLEKMVAKQHGKVVMAKVDIDDHTDLAIEYEVSAVPTVLAIKNGDVVDKFVGIKDEDQLEAFLKKLIG

SEQ ID NO: 157 - protein, 33 aa, Sus scrofa
VKQIESKYAFQEALNSAGEKLVVVDFSATWCGP

SEQ ID NO: 158 - protein, 104 aa, Oryctolagus cuniculus
VKQIESKSAFQEVLDSAGDKLVVVDFSATWCGPCKMIKPFFHALSEKFNNVVFIEVDVDDCKDIAAECEVKCMPTFQFFKKGQKVGEFSGANKEKLEATINELL

SEQ ID NO: 159 - protein, 104 aa, Rattus norvegicus
VKLIESKEAFQEALAAAGDKLVVVDFSATWCGPCKMIKPFFHSLCDKYSNVVFLEVDVDDCQDVAADCEVKCMPTFQFYKKGQKVGEFSGANKEKLEATITEFA

SEQ ID NO: 160 - protein, 166 aa, Rattus norvegicus
MAQRLLLRRFLTSVISRKPPQGVWASLTSTSLQTPPYNAGGLTGTPSPARTFHTTRVCSTTFNVQDGPDFQDRVVNSETPVVVDFHAQWCGPCKILGPRLEKMVAKQHGKVVMAKVDIDDHTDLAIEYEVSAVPTVLAIKNGDVVDKFVGIKDEDQLEAFLKKLIG

SEQ ID NO: 161 - protein, 104 aa, Ovis aries
VKQIESKYAFQEALNSAGEKLVVVDFSATWCGPCKMIKPFFHSLSEKYSNVVFLEVDVDDCQDVAAECEVKCMPTFQFFKKGQKVSEFSGANKEKLEATINELI

SEQ ID NO: 162 - protein, 261 aa, Arabidopsis thaliana
MARLVFSLNLPSSHGFNLSPRNLQSFFVTQTGAPRFRAVRCKPNPESSETKQEKLVIDNGETSSASKEVESSSSVADSSSSSSSGFPESPNKDINRRVAAVTVIAALSLFVSTRLDFGISLKDLTASALPYEEALSNGKPTVVEFYADWCEVCRELAPDVYKIEQQYKDKVNFVMLNVDNTKWEQELDEFGVEGIPHFAFLDREGNEEGNVVGRLPRQYLVENVNALAAGKQSIPYARAVGQYSSSESRKVHQVTDPLSHG

SEQ ID NO: 163 - protein, 140 aa, Arabidopsis thaliana
MGSCVSKGKGDDDSVHNVEFSGGNVHLITTKESWDDKLAEADRDGKIVVANFSATWCGPCKIVAPFFIELSEKHSSLMFLLVDVDELSDFSSSWDIKATPTFFFLKNGQQIGKLVGANKPELQKKVTSIIDSVPESPQRP

SEQ ID NO: 164 - protein, 186 aa, Arabidopsis thaliana
MSEIVNLSSSLRSLNPKISPLVPPYRQTSSSFSRPRNFKYHSFTDKICLAAERIRAVDIQKQDGGLQELDDSPVSVELGPICGESHFDQVMEDAQKLGESVVIVWMAAWCRKCIYLKPKLEKLAAEFYPRLRFYHVDVNAVPYRLVSRAGVTLWRDGQKQAEVIGGHKAHFVVNEVREMIENDSIT

SEQ ID NO: 165 - protein, 207 aa, Arabidopsis thaliana
MENMSNLTSKFLLNPLNVHKHCAVSDENGDRKSHVLKQVCSCICCCNRRNKTQARSQKGSYFIKGKVHPVSRMEKWEEKITEANSHGKIIARHDLILCNMEQLVVNFKASWCLPSKTILPIYQELASTYTSMIFVTIDVEELAISKLSDLGVKICLIQEFSHEWNVDATPTVVFLKDGRQMDKLVGGDAAELQKKTAAAANLLLRQS

SEQ ID NO: 166 - protein, 175 aa, Arabidopsis thaliana
MLIPHAVSFAFTYLRNSANPDQNREVISIHSTSELEAKTKAAKKASRLLILYFTATWCGPCRYMSPLYSNLATQHSRVVFLKVDIDKANDVAASWNISSVPTFCFIRDGKEVDKVVGADKGSLEQKIAQHSSSKARYIPVFIKYHSDLLLLVNEETPTSNQKLKTKTGDWFHINL

SEQ ID NO: 167 - protein, 132 aa, Arabidopsis thaliana
MRKQESEGANLEFESKSNDNGNVKIAPNDQSFLTILDDIKSSKSPAVINYGASWYTLFSVFTITLFMLIKCSMKCLNENGFVLKLSDIDECPETTRHIRYTPTFQFYRDGEKVDEMFGAGEQRLHDRLWLHS

SEQ ID NO: 168 - protein, 151 aa, Arabidopsis thaliana
MASISLSSSTVPSLNSKESSGVSAFASRSISAVKFQFPVRRIEAKKQTFDSFEDLLVNSDKPVLVDYYATWCGPCQFMVPILNEVSETLKDKIQVVKIDTEKYPSIANKYKIEALPTFILFKDGEPCDRFEGALTAKQLIQRIEDSLKVKP

SEQ ID NO: 169 - protein, 236 aa, Arabidopsis thaliana
MAGVVRLTTTSVQAIRVSSSFSSFATALNPLQPCLPPNSNLNSDKRLRLLSSSPSCSSSHYHPSSGLGSHLPLRRPKSQVVRVKVDENVAETEPPKWWERNAPNMVDIHSTEEFLSALSGAGERLVIVEFYGTWCASCRALFPKLCKTAVEHPDIVFLKVNFDENKPMCKSLNVRVLPFFHFYRGADGQLESFSCSLAKVKKAISVSPFPQLELGITLQTKRTTSLFFFDRIYQIL

SEQ ID NO: 170 - protein, 131 aa, Hordeum bulbosum
MGGCVGKDRSIVEDKLDFKGGNVHVITTKEDWDQKVAEANKDGKIVVANFSASWCGPCRVIAPVYAEMSKTYPQLMFLTIDVDDLMDFGSTWDIRATPTFFFLKNGQQIDKLVGANKPELEKKVQALGDGS

SEQ ID NO: 171 - protein, 131 aa, Lolium perenne
MGGCVGKDRSIVEDKLDFKGGNVHVITTKEDWDQKVAEANKDGKIVVANFSASWCGPCRVIAPVYAEMSKTYPQLMFLTIDVDDLMDFSSTWDIRATPTFFFLKNGQLIDKLVGANRPELEKKVQAIGDGS

SEQ ID NO: 172 - protein, 131 aa, Oryza sativa
MGSCVGKERSDEEDKIDFKGGNVHVISNKENWDHKIAEANKDGKIVIANFSAAWCGPCRVIAPVYAEMSQTYPQFMFLTIDVDELMDFSSSWDIRATPTFFFLKNGEQVDKLVGANKPELEKKVAALADSA

SEQ ID NO: 173 - protein, 296 aa, Solanum tuberosum
MATLTNFLLKPSPNLASITKISPSLYSNFPFEKSKQSIFKNLKTNKPLLITKATAAPDVEKKVAKSERVQKVNSMEELDEALKKAKNRLVVVEFAGKDSERSKNIYPFMVNLSKTCNDVDFLLVIGDETEKTKALCRREKIDKVPHFNFYKSMEKIHEEEGIGPDLLAGDVLYYGDSHSEVVQLHSREDVEKVIQDHKIDKKLIVLDVGLKHCGPCVKVYPTVIKLSKQMADTVVFARMNGDENDSCMQFLKDMDVIEVPTFLFIRDGEICGRYVGSGKGELIGEILRYQGVRVTY

SEQ ID NO: 174 - protein, 131 aa, Secale cereale
MGGCVGKGRSIVEEKLDFKGGNVHVITTKEDWDQKIEEANKDGKIVVANFSASWCGPCRVVAPVYAGMSKTYPQLMFLTIDVDDLMDFSSTWDIRATPTFFFLKNGQQIDKLVGANKPELEKKVQALGDGS

SEQ ID NO: 175 - protein, 119 aa, Secale cereale
MGGCVGKGRSIVEEKLDFKGGNVHVITTKEDWDQKIEEANKDGKIVVANFSASWCGPCRVIAPVYAEMSKTYPQLMFLTIDVDDLMDFSSTWDIRATPTFFFLKNGQQIDKLVGANKPE

SEQ ID NO: 176 - protein, 106 aa, Manduca sexta
MSIHIKDADDLKNRLAEAGDKLVVIDFMATWCGPCKMIGPKLDEMAAEMADSIVVVKVDVDECEDIAADYNINSMPTFVFVKNSKKLEEFSGANVDKLKNTILKLK

SEQ ID NO: 177 - protein, 221 aa, Bradyrhizobium japonicum
MLDTKPSATRRIPLVIATVAVGGLAGFAALYGLGLSRAPTGDPACRAAVATAQKIAPLAHGEVAALTMASAPLKLPDLAFEDADGKPKKLSDFRGKTLLVNLWATWCVPCRKEMPALDELQGKLSGPNFEVVAINIDTRDPEKPKTFLKEANLTRLGYFNDQKAKVFQDLKAIGRALGMPTSVLVDPQGCEIATIAGPAEWASEDALKLIRAATGKAAAAL

SEQ ID NO: 178 - protein, 167 aa, Haemophilus influenzae; identical to SEQ ID NO: 122

SEQ ID NO: 179 - protein, 163 aa, Leishmania major
MLKVSSKEHYAEIKKKAEDSLGLVVHFSATWCEPCTAVNEHLTKQAAEYGDNVVFAEVDCGELGDVCEAEGVESVPFVAYFRTPLVGDDRRVERVADVAGAKFDQIDMNTHSLFGEKGGNRGSAEGLCHSGRLPALPHEAARGRNVHHRHPISSALRLYWSAV

SEQ ID NO: 180 - protein, 275 aa, Mortierella alpina
MVSNNYIDITSEDDFAQVFQPSSSTVYALNFWAAWAPPCVQMNEVFEELAAKNANVNFLKIEAEKFPDISEDYEIAAVPSFVIVKEGTVVDRVEGANAPELAKVIAKYSKSTSSPLPTQSSTMAAAGHAAPSVAPPTMSPEEMNARLKELTSSSSVMAFIKGTPTAPRCQFSRQLLEILTAQNIRFSSFNILADDEVRQAMKTFSDWPTFPQVYVKGEFVGGLDVVKELVASGEFQALVPAEKDLKTRMDELIRKAPVMIFIKGSPETPRCGFSK

SEQ ID NO: 181 - protein, 160 aa, Neisseria gonorrhoeae
MKRLILAAIALAATFGAHTASGDELAGWKDNTPQNLQSLKAPVRIANLWATWCGPCRKEMPAMSKWYKAQKKGSVDMVGIALDTSDNIGNFLKQTPVSYPIWRYTGANSRSFMKSYGNNVGVLPFTVVEAPKCGYRQTITGELNEKSLTEAVKLAHSKCR

SEQ ID NO: 182 - protein, 208 aa, Rhizobium loti
MAGALAGAVAVYVSESRSGNNAPARVAVGGSKDDVACAAKSGRAKKIAAAATGEVAALLPADPPQSMKSLAFNGPDGKPMTIADHAGKTVLLNLWATWCAPCRAEMPALNALQKDKGSDAFQVIAVNVDAGDDVKPKKFLKETGVEALGYFRDSTVALFNDLKARGLALGLPVTMLIDSEGCLIAHMNGPAEWSGRDARRLVETALGS

SEQ ID NO: 183 - protein, 176 aa, Rhodobacter capsulatus
MAKPLMFLPLLVMAGFVGAGYFAMQQNDPNAMPTALAGKEAPAVRLEPLGAEAPFTDADLRDGKIKLVNFWASWCAPCRVEHPNLIGLKQDGIEIMGVNWKDTPDQAQGFLAEMGSPYTRLGADPGNKMGLDWGVAGVPETFVVDGAGRILTRIAGPLTEDVITKKIDPLLAGTAD

SEQ ID NO: 184 - protein, 105 aa, Synechocystis; identical to SEQ ID NO: 118

SEQ ID NO: 185 - protein, 109 aa, Synechocystis; identical to SEQ ID NO: 141

SEQ ID NO: 186 - protein, 290 aa, Schizosaccharomyces pombe
MSVIEIRSYQHWISTIPKSGYLAVDCYADWCGPCKAISPLFSQLASKYASPKFVFAKVNVDEQRQIASGLGVKAMPTFVFFENGKQIDMLTGANPQALKEKVALISSKATGTGALASSSSAPVKGFASLQGCIENPQLECLNQQDDHDLKSAFNSNPSSFLESDVDEQLMIYIPFLEVVKVHSIAITPVKGETSSAPKTIKLYINQPNNLSFEDAESFTPTQVIEDIVYEQDDQPTIIPLRFVKFQRVNSLVIFIYSNVGEEETTKISRLELFGEPVGDSSKGKLQKVEA

SEQ ID NO: 187 - protein, 185 aa, Treponema pallidum
MFRSDLVLAVWGVTCVQAADVAHNADVPSRSLKALERFRFFVYPKPLDLSSDFHAKALKGEALVPSLFKGKVTLLNFWATWCPPCRAEMPSMDRMQALMRGNDFQIVAVNVGDSRKQVESFIARGKHTFPIYLDEEGSLGSVFASRGLPTTYVVDKAGRIVAVVVGSVEYDQPELVALFKELARD

SEQ ID NO: 188 - protein, 246 aa, Caenorhabditis elegans
MLLRLLAVLGLFAVGVSGGPTRSSKLVFLNEENWTDLMKGEWMIEFHAPWCPACKDLQKAWNAFADWSDDLGIKVGEVDVTVNPGLSGRFLVTALPTIYHVKDGVFRQYSGARDKNDFISFVEDKKYRVIDPVPDYKHPNSKQMAVVAVFFKLSMSVRDLHNHLVEDKGIPSWASYGLFAGVTLALGCVLGFFIVIIIDQVFPTGPRKSQQAKKTEKKDAKKDSGTESPTKKNGNNNNGKETKKTK

SEQ ID NO: 189 - protein, 284 aa, Caenorhabditis elegans
MPVINVKDDEDFRNQLSLAGLKSVIVDFTAVWCGPCKMIAPTFEALSNQYLGAVFLKVDVEICEKTSSENGVNSMPTFMVFQSGVRVEQMKGADAKALETMVKKYADNSAADSLVAGQMDLTPLVDKKQMECLNESDDTPLGRFLEGNCNLVSDCDEQLIISLPFNQPVKVHSILIKGVSDRAPKKVKVFINLPKTTDFDNATALEPTQMLEFDESSIQGHGQVVALKYVKFQNVQNIQFFIENNVGGGDVTELVKLTVFGTPLSALNMNEFKRVAGKAGDAAH

SEQ ID NO: 190 - protein, 287 aa, Drosophila melanogaster
MSVRVINDESHFQAELAQAGIQLVVVDFTASWCGPCKRIAPIFETFPTKYPKAIFLKVDVDKCQDTAAGQGVSAMPTFIFYRNRTKIDRVQGADVNGLEAKIQEHIGTSGGEEGGEDYGQGLMELNTFISKQECECLNEADDHNLKHALASAGGYLQSDCDEQLILSITFNQAVKIHSLKFKAPSHLGPKDVKLFINQPRTIDFDMAESMNSVQDLSLAQKELESGVPVNLRYVKFQNVQNIQIFVKNNQSGGDVTQIDYIGFIGSPIMTTKMNDFKRVAGKKGESH

SEQ ID NO: 191 - protein, 289 aa, Homo sapien
MVGVKPVGSDPDFQPELSGAGSRLAVVKFTMRGCGPCLRIAPAFSSMSNKYPQAVFLEVDVHQCQGTAATNNISATPTFLFFRNKVRIDQYQGADAVGLEEKIKQHLENDPGSNEDTDIPKGYMDLMPFINKAGCECLNESDEHGFDNCLRKDTTFLESDCDEQLLITVAFNQPVKLYSMKFQGPDNGQGPKYVKIFINLPRSMDFEEAERSEPTQALELTEDDIKEDGIVPLRYVKFQNVNSVTIFVQSNQGEEETTRISYFTFIGTPVQATNMNDFKRVVGKKGESH

SEQ ID NO: 192 - protein, 335 aa, Homo sapien
MEAGAAEAAVAAVEEVGSAGQFEELLRLKAKSLLVVHFWAPWAPQCAQMNEVMAELAKELPQVSFVKLEAEGVPEVSEKYEISSVPTFLFFKNSQKIDRLDGAHAPELTKKVQRHASSGSFLPSANEHLKEDLNLRLKKLTHAAPCMLFMKGTPQEPRCGFSKQMVEILHKHNIQFSSFDIFSDEEVRQGLKAYSSWPTYPQLYVSGELIGGLDIIKELEASEELDTICPKAPKLEERLKVLTNKASVMLFMKGNKQEAKCGFSKQILEILNSTGVEYETFDILEDEEVRQGLKAYSNWPTYPQLYVKGELVGGLDIVKELKENGELLPILRGEN

SEQ ID NO: 193 - protein, 131 aa, Phalaris coerulescens
MGGCVGKDRGIVEDKLDFKGGNVHVITTKEDWDQKIAEANKDGKIVVANFSASWCGPCRVIAPVYAEMSKTYPQLMFLTIDVDDLVDFSSTWDIRATPTFFFLKNGQQIDKLVGANKPELEKKVQALGDGS

SEQ ID NO: 194 - protein, 144 aa, Trypanosoma brucei brucei
MSGLAKYLPGATNLLSKSGEVSLGSLVGKTVFLYFSASWCPPCRGFTPVLAEFYEKHHVAKNFEVVLISWDENESDFHDYYGKMPWLALPFDQRSTVSELGKTFGVESIPTLITINADTGAIIGTQARTRVIEDPDGANFPWPN

SEQ ID NO: 195 - protein, 333 aa, Arabidopsis thaliana
MNGLETHNTRLCIVGSGPAAHTAAIYAARAELKPLLFEGWMANDIAPGGQLTTTTDVENFPGFPEGILGVELTDKFRKQSERFGTTIFTETVTKVDFSSKPFKLFTDSKAILADAVILATGAVAKRLSFVGSGEASGGFWNRGISACAVCDGAAPIFRNKPLAVIGGGDSAMEEANFLTKYGSKVYIIHRRDAFRASKIMQQRALSNPKIDVIWNSSVVEAYGDGERDVLGGLKVKNVVTGDVSDLKVSGLFFAIGHEPATKFLDGGVELDSDGYVVTKPGTTQTSVPGVFAAGDVQDKKYRQAITAAGTGCMAALDAEHYLQEIGSQQGKSD

SEQ ID NO: 196 - protein, 383 aa, Arabidopsis thaliana
MCWISMSQSRFIIKSLFSTAGGFLLGSALSNPPSLATAFSSSSSSSSAAAAVDMETHKTKVCIVGSGPAAHTAAIYASRAELKPLLFEGWMANDIAPGGQLTTTTDVENFPGFPEGILGIDIVEKFRKQSERFGTTIFTETVNKVDFSSKPFKLFTDSRTVLADSVIISTGAVAKRLSFTGSGEGNGGFWNRGISACAVCDGAAPIFRNKPLVVIGGGDSAMEEANFLTKYGSKVYIIHRRDTFRASKIMQQRALSNPKIEVIWNSAVVEAYGDENGRVLGGLKVKNVVTGDVSDLKVSGLFFAIGHEPATKFLDGQLELDEDGYVVTKPGTTKTSVVGVFAAGDVQDKKYRQAITAAGTGCMAALDAEHYLQEIGSQEGKSD

SEQ ID NO: 197 - protein, 323 aa, Aquifex aeolicus
MAVSLMQQPDKVYDVIIIGAGPAGTTAAIYTARAGWKTLVLYRAEADGALGVTQKIENYPGVPGPLSGYELLKIMREQAKSFGAEFVRGKVIATDLNSDPKKVYTIDGREFRGKTIIVASGAMERANKFKGEEEFLGRGVSYCGVCDAAFFKDQPVAVIGDDDYAIEEAEFIARFANKVFFVVPGSKIKAPPEVIEHFEKLPNVEILLRHRPIEIVGDQVVKGIKLKDLEKKEEKLLEVNGVFIFLGGTKPSVDFLMGQVEMTEGDCIVVNEEMMTSVPGVFAAGDVLCNEVKQAVVAAAMGCKAALAVDKFLSGKKKIVPQW

SEQ ID NO: 198 - protein, 315 aa, Bacillus subtilis
SEEKIYDVIIIGAGPAGMTAAVYTSRANLSTLMIERGIPGGQMANTEDVENYPGFESILGPELSNKMFEHAKKFGAEYAYGDIKEVIDGKEYKVVKAGSKEYKARAVIIAAGAEYKKIGVPGEKELGGRGVSYCAVCDGAFFKGKELVVVGGGDSAVEEGVYLTRFASKVTIVHRRDKLRAQSILQARAFDNEKVDFLWNKTVKEIHEENGKVGNVTLVDTVTGEESEFKTDGVFIYIGMLPLSKPFENLGITNEEGYIETNDRMETKVEGIFAAGDIREKSLRQIVTATGDGSIAAQSVQHYVEELQETLKTLK

SEQ ID NO: 199 - protein, 326 aa, Borrelia burgdorferi
MLEFETIDINLTKKKNLSQKEVDFIEDVIIVGSGPAGLTAGIYSVMSNYKAAILEGPEPGGQLTTTTEVYNYPGFKNGISGRNLMLNMREQVVNLGAKTFPETVFSIKRKGNIFYLYTENYIYKSKAVIIAVGSKPKKLETLKNSGLFWNKGISVCAICDGHLFKGKRVAVIGGGNTALSESIYLSKLVDKVYLIVRKNNLRAIAMLRDSVAKLPNIEILYNSEAIEVDGKSSVSSVKIFNKKDNVVYELEVSAVFMAVGYKPNTEFLKGFLDLDEEGFIVTKDVVKTSVDGVFSCGDVSNKLYAQAITAAAEGFIASVELGNFLK

SEQ ID NO: 200 - protein, 319 aa, Buchnera aphidicola
MDKVKHSKIIILGSGPAGYTAAIYAARANLDPFLITGTNKGGQLMNTNEIENWPGDYNKISGSELMNRMYKHAIELKTKVICDTVISVNFKKNPFFLIGENNKYTADSVIIATGANPRYLGLQSESLFKGKGVSTCAVCDGFFYKNKEVAVVGGGNTAIEETLYLSNFVKKVHLIHRGINFRAEKILLDRLEKKIKSQKIIIYLNSIVKNILGNSSGVTALLIEQKNSKEKTESKIQVSGLFVAIGYTPNTNIFVNKLKMKDGYIQVTRQEHGNYTQTSIPGIFAAGDVIDHVYRQAITSSASGCMAALDSERYINSLV

SEQ ID NO: 201 - protein, 319 aa, Buchnera aphidicola
MELKNHKKIIILGSGPAGYTAAIYSSRANLNPLLITGINKGGQLMNTNEIENWPGDFKKITGPELMNRMHEHSLKFKTEIVYDNIISVEFKKKPFFLLGEYNKYTCDAVIIATGANPRYLGLSSENKFKGKGISTCAVCDGFFYKNKEIAVVGGGNTAIEETLYLSNFVKKIYLIHRRNNFKAEKILIDRLLKIVKTKKVILHLNSTIEDILGNNKGVTHLLIKNKNLKEKKKLKIAVSGLFVAIGYIPNTDIFTDQLKMKDGYIKIKKGTHGNYTQTNIPGVFAAGDVIDHVYRQAITSSASGCMAALDSERYLNSLS

SEQ ID NO: 202 - protein, 312 aa, Chlamydia muridarum
MTHVKLAIIGSGPAGYTAAIYASRALLTPILFEGFFSGIAGGQLMTTTEVENFPGFPQGVLGHQLMENMKMQAQRFGTQVIAKDITSVDFSVRPFVLKSGEDTFTCDACIIATGASAKRLSIPGAGDNEFWQKGVTACAVCDGASPIFRDRDLFVIGGGDSALEEAMFLTRYGKRVFVVHRRDTLRASKAMVNKAQANEKIVFLWNSEVVKILGDSLVRSIDIFNNVEKTTVTMEAAGVFFAIGHQPNTAFLGGQLSLDENGYIITEKGSSRTSVPGVFAAGDVQDKYYRQAITSAGSGCMAALDAERFLEK

SEQ ID NO: 203 - protein, 311 aa, Chlamydia pneumoniae
MIHSRLIIIGSGPSGYTAAIYASRALLHPLLFEGFFSGISGGQLMTTTEVENFPGFPEGILGPKLMNNMKEQAVRFGTKTLAQDIISVDFSVRPFILKSKEETYSCDACIIATGASAKRLEIPGAGNDEFWQKGVTACAVCDGASPIFKNKDLYVIGGGDSALEEALYLTRYGSHVYVVHRRDKLRASKAMEARAQNNEKITFLWNSEIVKISGDSIVRSVDIKNVQTQEITTREAAGVFFAIGHKPNTDFLGGQLTLDESGYIVTEKGTSKTSVPGVFAAGDVQDKYYRQAVTSAGSGCIAALDAERFLG

SEQ ID NO: 204 - protein, 312 aa, Chlamydia trachomatis
MTHAKLVIIGSGPAGYTAAIYASRALLTPVLFEGFFSGIAGGQLMTTTEVENFPGFPEGVLGHQLMDLMKTQAQRFGTQVLSKDITAVDFSVRPFVLKSGKETFTCDACIIATGASAKRLSIPGAGDNEFWQKGVTACAVCDGASPIFRDKDLFVVGGGDSALEEAMFLTRYGKRVFVVHRRDTLRASKVMVNKAQANEKIFFLWNSEIVKISGDTLVRSIDIYNNVDETTTTMEAAGVFFAIGHQPNTAFLGGQVALDENGYIITEKGSSRTSVPGVFAAGDVQDKYYRQAITSAGSGCMAALDAERFLEN

SEQ ID NO: 205 - protein, 315 aa, Clostridium litorale
MENVYDIAIIGSGPAGLAAALYGARAKMKTLLLEGMKVGGQIVITHEVANYPGSVPEATGPSLIGRMEEQVEEFGAERVMDNIVDVDFTDKIKVLKGAKGEYKAKAVIVATGASPKLAGCPGEKELTGKGVSYCATCDADFFEDMEVFVIGGGDTAVEEAMFLTKFARKVTIVHRRAELRAAKSIQEKAFKNEKLNFMWNTVIEEIKGDGIVESAVFKNRETGEVTEFVAPEEDGTFGIFVFIGYDPKSALVEGKLELDETGYIPTDDNMKTNVEGVFAAGDIRVKSLRQVVTATADGAIAAVQAEKYIEELFAE

SEQ ID NO: 206 - protein, 321 aa, Coxiella burnetii
MNKPQHHSLIILGSGPAGYTDAIYVARANLKPIMITGMEQGGQLMTTTDVANWPGEAPGLQGPKLLERMQKHAGGALNTQFIFDHINKPDLNPRPFLLQGDNATYSCDALIIATGASARYLGLPSEKPYMGKGVSACATCDGFFYRAKKVAVVGGGNTSVEEALYLSHIASHVTLIHRRDKLRAEKMLSAQLIKKVEEGKVAIVWSHVIEEVLGDDQGVTGVHLKHVKEEKTQDLTIDGLFIAIGHDPNTKIFKEQLEMDEAGYLRAKSGLQGNATATNIPGVFPAVVVRGQLYRQTIAAAGMGCMPALDAERYLDSLNQA

SEQ ID NO: 207 - protein, 320 aa, Escherichia coli
GTTKHSKLLILGSGPAGYTAAVYAARANLQPVLITGMEKGGQLTTTTEVENWPGDPNDLTGPLLMERMHEHATKFETEIIFDHINKVDLQNRPFRLNGDNGEYTCDALIIATGASARYLGLPSEEAFKGRGVSACATCDGFFYRNQKVAVIGGGNTAVEEALYLSNIASEVHLIHRRDGFRAEKILIKRLMDKVENGNIILHTNRTLEEVTGDQMGVTGVRLRDTQNSDNIESLDVAGLFVAIGHSPNTAIFEGQLELENGYIKVQSGIHGNATQTSIPGVFAAGDVMDHIYRQAITSAGTGCMAALDAERYLDGLADAK

SEQ ID NO: 208 - protein, 315 aa, Eubacterium acidaminophilum
MENVYDLAIIGSGPAGLAAALYGARAKMKTIMIEGQKVGGQIVITHEVANYPGSVREATGPSLIERMEEQANEFGAEKVMDKIVDVDLDGKIKVIKGEKAEYKAKSVILATGAAPRLAGCPGEQELTGKGVSYCATCDADFFEDMEVFVVGGGDTAVEEAMYLAKFARKVTIVHRRDELRAAKSIQEKAFKNPKLDFMWNSAIEEIKGDGIVESAVFKNLVTGETTEYFANEEDGTFGIFVFIGYIPKSDVFKGKITLDDAGYIITDDNMKTNVEGVFAAGDIRVKSLRQVVTACADGAIAATQAEKYVEANFEE

SEQ ID NO: 209 - protein, 318 aa, Haemophilus influenzae
MSDIKHAKLLILGSGPAGYTAAIYAARANLKPVLVTGLQQGGQLTTTDEIENWPGDFEMTTGSGLMQRMLQHAEKFETEIVFDHINRVDLSSRPFKLFGDVQNFTCDALIIATGASARYIGLPSEENYKGRGVSACATCDGFFYRNKPVGVIGGGNTAVEEALYLANIASTVHLIHRRDSFRAEKILIDRLYKKVEEGKIVLHTDRTLDEVLGDNMGVTGLRLANTKTGEKEELKLDGLFVAIGHSPNTEIFQGQLELNNGYIVVKSGLDGNATATSVEGVFAAGDVMDHNYRQAITSAGTGCMAALDAERYLDAQEA

SEQ ID NO: 210 - protein, 311 aa, Helicobacter pylori
MIDCAIIGGGPAGLSAGLYATRGGVKNAVLFEKGMPGGQITGSSEIENYPGVKEVVSGLDFMQPWQEQCFRFGLKHEMTAIQRVSKKGSHFVILAEDGKTFEAKSVIIATGGSPKRTGIKGESEYWGKGVSTCATCDGFFYKNKEVAVLGGGDTAVEEAIYLANICKKVYLIHRRDGFRCAPITLEHAKNNSKIEFLTPYVVEEIKGDASGVSSLSIKNTATNEKRELVVPGLFIFVGYDVNNAVLKQEDNSMLCECDEYGSIVVDFSMKTNVQGLFAAGDIRIFAPKQVVCAASDGATAALSVISYLEHH

SEQ ID NO: 211 - protein, 311 aa, Helicobacter pylori
MIDCAIIGGGPAGLSAGLYATRGGVKNAVLFEKGMPGGQITGSSEIENYPGVKEVVSGLDFMQPWQEQCFRFGLKHEMTAVQRVSKKDSHFVILAEDGKTFEAKSVIIATGGSPKRTGIKGESEYWGKGVSTCATCDGFFYKNKEVAVLGGGDTAVEEAIYLANICKKVYLIHRRDGFRCAPITLEHAKNNDKIEFLTPYVVEEIKGDASGVSSLSIKNTATNEKRELVVPGFFIFVGYDVNNAVLKQEDNSMLCKCDEYGSIVVDFSMKTNVQGLFAAGDIRIFAPKQVVCAASDGATAALSVISYLEHH

SEQ ID NO: 212 - protein, 319 aa, Listeria monocytogenes
MASEEKIYDVIIIGAGPAGMTAALYTSRADLDTLMIERGVPGGQMVNTAEVENYPGFDSILGPDLSDKMLSGAKQFGAEYAYGDIKEVVDGKEFKTVTAGSKTYKARAIIIATGAEHRKLGAAGEEELSGRGVSYCAVCDGAFFKNRELIVVGGGDSAVEEGTYLTRYADKVTIVHRRDKLRAQQILQDRAFKDEKVDFIWNSTVEEIVGDGKKVTGAKLVSTVDGSESIMPVDGVFIYVGLVPLTKAFLNLGITDDEGYIVTDEEMRTNLPGIFAAGDVRAKSLRQIVTATGDGGLAGQNAQKYVEELKESLEAEAAK

SEQ ID NO: 213 - protein, 315 aa, Mycoplasma genitalium
MLKVNADFLTKDQVIYDLVIVGAGPAGIASAIYGKRANLNLAIIEGNTPGGKIVKTNIVENYPGFKTITGPELGLEMYNHLLAFEPVVFYNNLIKIDHLNDTFILYLDNKTTVFSKTVIYATGMEERKLGIEKEDYFYGKGISYCAICDAALYKGKTVGVVGGGNSAIQEAIYLSSIAKTVHLIHRREVFRSDALLVEKLKKISNVVFHLNATVKQLIGQEKLQTVKLASTVDKSESEIAIDCLFPYIGFESNNKPVLDLKLNLDQNGFILGDENMQTNIKGFYVAGDCRSKSFRQIATAISDGVTAVLKVRDDI

SEQ ID NO: 214 - protein, 458 aa, Mycobacterium leprae; identical to SEQ ID NO: 36

SEQ ID NO: 215 - protein, 315 aa, Mycoplasma pneumoniae
MLKVKSDFLTKDQVIYDVAIVGAGPAGIAAGIYGKRANLNLAIIEGSTPGGKVVKTNIVENYPGYKSITGPDLGLEMYNHLIDLEPTFFYANLIKLDKAADTFILYLDDKTVVFAKTVIYATGMLERKLGVAKEDHFYGKGISYCAICDGSLYKDQVVGVVGGGNSAIQEALYLASMAKTVHLIHRREGFRADETALNKLRNLPNVVFHLNYTVKELLGNNTLNGIVLQNTLDHSTKQIDLNCVFPYIGFESITKPVEHLNLKLDPQGFLITNEQMETSLKGLFAAGDCRSKHFRQIGTAINDGIIAVLTIRDVL

SEQ ID NO: 216 - protein, 311 aa, Mycobacterium smegmatis
MSTSQTVHDVIIIGSGPAGYTAAIYAARAQLKPLVFEGTQFGGALMTTTEVENYPGFREGITGPELMDQMREQALRFRADLRMEDVDAVQLEGPVKTVVVGDETHQARAVILAMGAAARHLGVPGEEALTGMGVSTCATCDGFFFRDQDIVVVGGGDSAMEEATFLTRFARSVTLIHRRDEFRASKIMLERARANEKITFLTNTEITQIEGDPKVTGVRLRDTVTGEESKLDVTGVFVAIGHDPRSELVRGQVELDDEGYVKVQGRTTYTSLDGVFAAGDLVDHTYRQAITAAGSGCAASIDAERWLAEQD

SEQ ID NO: 217 - protein, 335 aa, Mycobacterium tuberculosis
MTAPPVHDRAHHPVRDVIVIGSGPAGYTAALYAARAQLAPLVFEGTSFGGALMTTTDVENYPGFRNGITGPELMDEMREQALRFGADLRMEDVESVSLHGPLKSVVTADGQTHRARAVILAMGAAARYLQVPGEQELLGRGVSSCATCDGFFFRDQDIAVIGGGDSAMEEATFLTRFARSVTLVHRRDEFRASKIMLDRARNNDKIRFLTNHTVVAVDGDTTVTGLRVRDTNTGAETTLPVTGVFVAIGHEPRSGLVREAIDVDPDGYVLVQGRTTSTSLPGVFAAGDLVDRTYRQAVTAAGSGCAAAIDAERWLAEHAATGEADSTDALIGAQR

SEQ ID NO: 218 - protein, 334 aa, Neurospora crassa
MHSKVVIIGSGPAAHTAAIYLARAELKPVLYEGFMANGIAAGGQLTTTTEIENFPGFPDGIMGQELMDKMKAQSERFGTQIISETVAKVDLSARPFKYATEWSPEEYHTADSIILATGASARRLHLPGEEKYWQNGISACAVCDGAVPIFRNKHLVVIGGGDSAAEEAMYLTKYGSHVTVLVRKDKLRASSIMAHRLLNHEKVTVRFNTVGVEVKGDDKGLMSHLVVKDVTTGKEETLEANGLFYAIGHDPATALVKGQLETDADGYVVTKPGTTLTSVEGVFAAGDVQDKRYRQAITSAGTGCMAALDAEKFLSEHEETPAEHRDTSAVQGNL

SEQ ID NO: 219 - protein, 333 aa, Penicillium chrysogenum
VHSKVVIIGSGAGAHTAAIYLSRAELQPVLYEGMLANGTAAGGQLTTTTDVENFPGFPSGIGGAELMDNMRAQSERFGTEIITETISKLDLSSRPFKMWTEWNDDEGSEPVRTADAVIIATGANARRLNLPGEETYWQNGISACAVCDGAVPIFRNKPLYVIGGGDSAAEEAMFLAKYGSSVTVLVRKDKLRASNIMADRLLAHPKCKVRFNTVATEVIGENKPNGLMTHLRVKDVLSNAEEVVEANGLFYAVGHDPASGLVKGQVELDDEGYIITKPGTSFTNVEGVFACGDVQDKRYRQAITSAGSGCVAALEAEKFIAETETHQEAKPVL

SEQ ID NO: 220 - protein, 310 aa, Rickettsia prowazekii
MKITTKVLIIGSGPAGLSAAIYTARSALKPILINGMQPGGQLTMTTDVENYPGFAETIQGPWLMEQMSMQAKNVGTEIISDYVERVDLSKRPFKIFTGTGNEYEADSIIICTGAESKWLGIASEQEFRGFGVSSCAICDGFFFKNQEIVVVGGGNSALEEALYLTNHANKVTVVHRRNSFRAEKILQDRLFKNPKISVIWDHIIDEIVGSNKPKAVTGVKIQNVYTNEINLVNCSGVFIAIGHAPNTALFKGQIAIDDDNYIVTQSGSTRTNVEGVFAAGDVQDKIYRQAVTAAASGCMAALEVAKFLNK

SEQ ID NO: 221 - protein, 322 aa, Schizosaccharomyces pombe
MTHNKVVIIGSGPAGHTAAIYLARGELKPVMYEGMLANGIAAGGQLTTTTDVENFPGFPDGINGTTLTENFRAQSLRFGTEIITETVSKLDLSSRPFKYWLEGAEEEEPHTADSVILATGASARRLHITGEDTYWQAGISACAVCDGAVPIYRNKPLAVVGGGDSAAEEAQFLTKYGSKVYVLVRRDKLRASPIMAKRLLANPKVEVLWNTVAEEAQGDGKLLNNLRIKNTNTNEVSDLQVNGLFYAIGHIPATKLVAEQIELDEAGYIKTINGTPRTSIPGFFAAGDVQDKVFRQAITSAGSGCQAALLAMHYLEELEDTD

SEQ ID NO: 222 - protein, 321 aa, Streptomyces clavuligerus
SDVRNVIIIGSGPAGYTAALYTARASLQPLVFEGAVTAGGALMNTTDVENFPGFRDGIMGPDLMDNMRAQAERFGAELIPDDVVSVDLTGDIKTVTDSAGTVHRAKAVIVTTGSQHRKLGLPREDALSGRGVSWCATCDGFFFKDQDIVVVGGGDTAMEEATFLSRFAKSVTIVHRRDSLRASKAMQDRAFADPKISFAWNSEVATIHGEQKLTGLTLRDTKTGETRELAATGLFIAVGHDPRTELFKGQLDLDDEGYLKVASPSTRTNLTGVFAAGDVVDHTYRQAITAAGTGCSAALDAERYLAALADSEQIAEPAPAV

SEQ ID NO: 223 - protein, 321 aa, Streptomyces coelicolor
SDVRNVIIIGSGPAGYTAALYTARASLKPLVFEGAVTAGGALMNTTEVENFPGFQDGIMGPELMDNMRAQAERFGAELIPDDVVAVDLSGEIKTVTDTAGTVHRAKAVIVTTGSQHRKLGLPNEDALSGRGVSWCATCDGFFFKDQDIAVIGGGDTAMEEATFLSRFAKSVTIVHRRDTLRASKAMQERAFADPKISFVWDSEVAEVQGDQKLAGLKLRNVKTGELSDLPVTGLFIAIGHDPRTELFKGQLDLDPEGYLKVDAPSTRTNLTGVFGAGDVVDHTYRQAITAAGTGCSAAVDAEPFLAALSDEDKAEPEKTAV

SEQ ID NO: 224 - protein, 307 aa, Treponema pallidium
METDYDVIIVGAGAAGLSAAQYACRANLRTLVIESKAHGGQALLIDSLENYPGYATPISGFEYAENMKKQAVAFGAQIAYEEVTTIGKRDSVFHITTGTGAYTAMSVILATGAEHRKMGIPGESEFLGRGVSYCATCDGPFFRNKHVVVIGGGDAACDESLVLSRLTDRVTMIHRRDTLRAQKAIAERTLKNPHIAVQWNTTLEAVRGETKVSSVLLKDVKTGETRELACDAVFFFIGMVPITGLLPDAEKDSTGYIVTDDEMRTSVEGIFAAGDVRAKSFRQVITATSDGALAAHAAASYIDTLQN

SEQ ID NO: 225 - protein, 45 aa, Vibrio fischeri
MNVKHSKLLILGSGPAGYTAAVYAARANLNPVMITGMQQGGQLTN

SEQ ID NO: 226 - protein, 318 aa, Saccharomyces cerevisiae
VHNKVTIIGSGPAAHTAAIYLARAEIKPILYEGMMANGIAAGGQLTTTTEIENFPGFPDGLTGSELMDRMREQSTKFGTEIITETVSKVDLSSKPFKLWTEFNEDAEPVTTDAIILATGASAKRMHLPGEETYWQKGISACAVCDGAVPIFRNKPLAVIGGGDSACEEAQFLTKYGSKVFMLVRKDHLRASTIMQKRAEKNEKIEILYNTVALEAKGDGKLLNALRIKNTKKNEETDLPVSGLFYAIGHTPATKIVAGQVDTDEAGYIKTVPGSSLTSVPGFFAAGDVQDSKYRQAITSAGSGCMAALDAEKYLTSLE

SEQ ID NO: 227 - protein, 342 aa, Saccharomyces cerevisiae
MIKHIVSPFRTNFVGISKSVLSRMIHHKVTIIGSGPAAHTAAIYLARAEMKPTLYEGMMANGIAAGGQLTTTTDIENFPGFPESLSGSELMERMRKQSAKFGTNIITETVSKVDLSSKPFRLWTEFNEDAEPVTTDAIILATGASAKRMHLPGEETYWQQGISACAVCDGAVPIFRNKPLAVIGGGDSACEEAEFLTKYASKVYILVRKDHFRASVIMQRRIEKNPNIIVLFNTVALEAKGDGKLLNMLRIKNTKSNVENDLEVNGLFYAIGHSPATDIVKGQVDEEETGYIKTVPGSSLTSVPGFFAAGDVQDSRYRQAVTSAGSGCIAALDAERYLSAQE

SEQ ID NO: 228 - protein, 499 aa, Bos taurus
MNGSKDLPEPYDYDLIIIGGGSGGLAAAKEAAKYDKKVMVLDFVTPTPLGTRWGLGGTCVNVGCIPKKLMHQAALLGQALRDSRNYGWNVEETVKHDWERMTEAVQNHIGSLNWGYRVALREKKVTYENAYGEFVGPHRIKATNNKGKEKIYSAERFLIATGERPRYLGIPGDKEYCISSDDLFSLPYCPGKTLVVGASYVALECAGFLAGIGLDVTVMVRSILLRGFDQDMANKIGEHMQEHGIKFIRQFVPIKVEQIEAGTPGRLRVIAKSTDSDQTIEGEYNTVLLAIGRDACTRKIGLENVGVKINEKTGKIPVTEEEQTNVPYIYAIGDILEGKLELTPVAIQAGRLLAQRLYGGSTVKCDYENVPTTVFTPLEYGSCGLSEEKAVEKFGEENVEVYHSYFWPLEWTIPSRDNNKCYAKVVCNIKDNERVVGFHVLGPNAGEVTQGFAAALKCGLTKDQLDSTIGIHPVCAEVFTTLSVTKRSGGNILQTGCCG

SEQ ID NO: 229 - protein, 523 aa, Caenorhabditis elegans
MYIKGNAVGGLKELKALKQDYLKEWLRDHTYDLIVIGGGSGGLAAAKEASRLGKKVACLDFVKPSPQGTSWGLGGTCVNVGCIPKKLMHQASLLGHSIHDAKKYGWKLPEGKVEHQWNHLRDSVQDHIASLNWGYRVQLREKTVTYINSYGEFTGPFEISATNKKKKVEKLTADRFLISTGLRPKYPEIPGVKEYTITSDDLFQLPYSPGKTLCVGASYVSLECAGFLHGFGFDVTVMVRSILLRGFDQDMAERIRKHMIAYGMKFEAGVPTRIEQIDEKTDEKAGKYRVFWPKKNEETGEMQEVSEEYNTILMAIGREAVTDDVGLTTIGVERAKSKKVLGRREQSTTIPWVYAIGDVLEGTPELTPVAIQAGRVLMRRIFDGANELTEYDQIPTTVFTPLEYGCCGLSEEDAMMKYGKDNIIIYHNVFNPLEYTISERMDKDHCYLKMICLRNEEEKVVGFHILTPNAGEVTQGFGIALKLAAKKADFDRLIGIHPTVAENFTTLTLEKKEGDEELQASGC

SEQ ID NO: 230 - protein, 497 aa, Homo sapiens [sequence omitted]

SEQ ID NO: 231 - protein, 541 aa, Plasmodium falciparum
MCKDKNEKKNYEHVNANEKNGYLASEKNELTKNKVEEHTYDYDYVVIGGGPGGMASAKEAAAHGARVLLFDYVKPSSQGTKWGIGGTCVNVGCVPKKLMHYAGHMGSIFKLDSKAYGWKFDNLKHDWKKLVTTVQSHIRSLNFSYMTGLRSSKVKYINGLAKLKDKNTVSYYLKGDLSKEETVTGKYILIATGCRPHIPDDVEGAKELSITSDDIFSLKKDPGKTLVVGASYVALECSGFLNSLGYDVTVAVRSIVLRGFDQQCAVKVKLYMEEQGVMFKNGILPKKLTKMDDKILVEFSDKTSELYDTVLYAIGRKGDIDGLNLESLNMNVNKSNNKIIADHLSCTNIPSIFAVGDVAENVPELAPVAIKAGEILARRLFKDSDEIMDYSYIPTSIYTPIEYGACGYSEEKAYELYGKSNVEVFLQEFNNLEISAVHRQKHIRAQKDEYDLDVSSTCLAKLVCLKNEDNRVIGFHYVGPNAGEVTQGMALALRLKVKKKDFDNCIGIHPTDAESFMNLFVTISSGLSYAAKGGCGGGKCG

SEQ ID NO: 232 - protein, 535 aa, Arabidopsis thaliana
MAASPKIGIGIASVSSPHRVSAASSALSPPPHLFFLTTTTTTRHGGSYLLRQPTRTRSSDSLRLRVSATANSPSSSSSGGEIIENVVIIGSGPAGYTAAIYAARANLKPVVFEGYQMGGVPGGQLMTTTEVENFPGFPDGITGPDLMEKMRKQAERWGAELYPEDVESLSVTTAPFTVQTSERKVKCHSIIYATGATARRLRLPREEEFWSRGISACAICDGASPLFKGQVLAVVGGGDTATEEALYLTKYARHVHLLVRRDQLRASKAMQDRVINNPNITVHYNTETVDVLSNTKGQMSGILLRRLDTGEETELEAKGLFYGIGHSPNSQLLEGQVELDSSGYVLVREGTSNTSVEGVFAAGDVQDHEWRQAVTAAGSGCIAALSAERYLTSNNLLVEFHQPQTEEAKKEFTQRDVQEKFDITLTKHKGQYALRKLYHESPRVILVLYTSPTCGPCRTLKPILNKVVDEYNHDVHFVEIDIEEDQEIAEAAGIMGTPCVQFFKNKEMLRLGNVLSVLKLHRLLCSGLAKDSESV

SEQ ID NO: 233 - protein, 117 aa, Helianthus annuus
AVVEAYGEEGKNVLGGLKVKNVVSGEVSDLKVNGLFFAIGHEPATKFLDGQLELDSDGYVVTKPGTTISSVKGVFAAGDVQDKKYRQAVTAAGSGCMAALDAEHYLQEIGSQEGKSD

SEQ ID NO: 234 - protein, 300 aa, Arcaeoglobus fulgidus
MYDVAIIGGGPAGLTAALYSARYGLKTVFFETVDPVSQLSLAAKIENYPGFEGSGMELLEKMKEQAVKAGAEWKLEKVERVERNGETFTVIAEGGEYEAKAIIVATGGKHKEAGIEGESAFIGRGVSYCATCDGNFFRGKKVIVYGSGKEAIEDAIYLHDIGCEVTIVSRTPSFRAEKALVEEVEKRGIPVHYSTTIRKIIGSGKVEKVVAYNREKKEEFEIEADGIFVAIGMRPATDVVAELGVERDSMGYIKVDKEQRTNVEGVFAAGDCCDNPLKQVVTACGDGAVAAYSAYKYLTS

SEQ ID NO: 235 - protein, 315 aa, Bacillus halodurans
MGEEQKVYDVVIAGAGPAGMTAAVYTSRANLSTVMVERGVPGGQMANTEDVENYPGFDHILGPELSTKMFEHAKKFGAEYAYGDIKEIIDQGDLKLVKAGNKEYKARAVIVATGAEYKKLGVPGEKELSGRGVSYCAVCDGAFFKGKELVVVGGGDSAVEEAVYLTRFASKVTIIHRRDQLRAQKILQQRAFDNDKIEFIWDHVVKQINGTDGKVSSVTIEHAKTGEQQDFKTDGVFIYIGMLPLNEAVKNLNILNDEGYIVTNEEMETSVPGIFAAGDVREKSLRQIVTATGDGSLAAQNVQHYIEELAEKVKN

SEQ ID NO: 236 - protein, 330 aa, Bacillus halodurans
MSRKEELYDITIIGGGPTGLFAAFYGGMRQAKVKIIESMPQLGGQLAALYPEKYIYDVAGFPKVKAQDLVNDLKRQAEQFNPTIALEQSVQNVTKETDDTFTIKTDKETHYSKAIIITAGAGAFQPRRLEVEGAKQYEGKNLQYFVNDLNAYAGKNVLISGGGDSAVDWALMLEPVAKNVTLIHRRDKFRAHEHSVELLQKSSVNILTPFAISELSGDGEKIHHVTIQEVKGDAVETLDVDEVIVNFGFVSSLGPIKGWGLEIEKNSIVVNTKMETNIPGIYAAGDICTYPGKVKLIATGFGEAPTAVNNAKAFIDPTARVFPGHSTSLF

SEQ ID NO: 237 - protein, 213 aa, Bacillus halodurans
MTNLHYTVKSLMRFKDKTVIISGGGNSAIDWANELEPIAKKVYLTYRKEALNGHEAQISQLLSSSATCLFHTTISKLIARDNKEVIEQVELTDHQTGEVTNLAVDEVIINHGYERDKSLLDQSEVTLDRIDDYYIAGTPTSATSVGGIYAAGDVLKHEGKLHLIAGAFQDAANAVNQAKQWIEPEAHQSAMVSSHNHVFKERNRELIRQMLKN

SEQ ID NO: 238 - protein, 136 aa, Bacillus halodurans
MNWEELYDVTIIGGGPAGLFSAFYSGLREMKTKVIEYQPMLGGKVHVYPEKMIWDVGGLTPILGEKLIEQLVTQALTFNPTVVLNEKVTSIAQEESGWFVIRTASGRAHLTKTVIIAVGGGILKPQKNRARRGRTI

SEQ ID NO: 239 - protein, 312 aa, Campylobacter jejuni
MLDVAIIGGGPAGLSAGLYATRGGLKNVVMFEKGMPGGQITSSSEIENYPGVAQVMDGISFMAPWSEQCMRFGLKHEMVGVEQILKNSDGSFTIKLEGGKTELAKAVIVCTGSAPKKAGFKGEDEFFGKGVSTCATCDGFFYKNKEVAVLGGGDTALEEALYLANICSKIYLIHRRDEFRAAPSTVEKVKKNEKIELITSASVDEVYGDKMGVAGVKVKLKDGSIRDLNVPGIFTFVGLNVRNEILKQDDSKFLCNMEEGGQVSVDLKMQTSVAGLFAAGDLRKDAPKQVICAAGDGAVAALSAMAYIESLH

SEQ ID NO: 240 - protein, 348 aa, Caulobacter crescentus
MSPLRRIHTISPPMSTLSPRQTRCLIIGSGPAGYTAAIYAARALLKPVLIAGIQPGGQLTITTDVENYPGFADVIQGPWLMDQMRAQAEHVGTEFVSDIVTSVDLSKRPFTVKTDSGQDWIAETIIIATGAQAKWLGLESEAKFQGFGVSACATCDGFFYRNKDVIVVGGGNTAVEEALFLTSFASKVTLVHRKDELRAEKILQERLLAHPKIEVIWDSVIDEVLGQTDPMGVTGARLKNVKTGETQEVAADGVFIAIGHAPSSELFAGQLETGSGGYLKVKPGTASTAIEGVYAAGDVTDDVYRQAVTAAGMGCMAALEAVRFLAEEDHKAAHHPISHAEANKIGVW

SEQ ID NO: 241 - protein, 285 aa, Clostridium acetobutylicum
MERYDIAIIGSGPAGLASAINAKTRNKSVIVFGSSDLSKKLTLAPVINNYLGFYGIRGAELQEKFKEHIDNMGIQIENVKVNNIYAMGEYFSIMTSKDTYEASKVILAMGMEHTKPLKGEDKFLGRGVGYCATCDAPLYKGKIVTIVGYNKEAESEANYLAELASKVYYVPRYKDEYQLVSAVEIVKDVPVEIVGDKKVEKLKLKSRELETDGVFVLKDSAPPEQLVPGLYVEDGHIKVNRKMETNIDGCYAAGDCTGKPYQYMKAVGEGQVAALNAVEKLYTKA

SEQ ID NO: 242 - protein, 291 aa, Clostridium acetobutylicum
MDRYDIAIIGSGPAGLSAAINAVIRNKKVILFGSDNLSNKLLKAPKINNYLGIYDVSGKELKEKFLEHLKYMNIEIKNEKVNSVYSMGDYFALSLNQKMYEATSIIIASGVEFSKPLNGEDELLGKGVGYCATCDAPLYKGKTVAIVGYTKEAEEEANYVSELAGKLYYIPMYKDKVSLKEVIEVVEDKPISILGKDKVSGLQMSKGEINTDAVFIIKDSVSPGKLVPGLLMNGEHIAVDIDMKTNIEGCFAAGDCAGRPYQYIKSAGQGQIAALSAVSYIDKIKLNKKII

SEQ ID NO: 243 - protein, 314 aa, Clostridium sticklandii
MSKIYDLVIIGAGPAGLSAGLYGARGKMSTLIIEKDKTGGQIVTTEEVANYPGSIHDASGPSLIARMAEQADEFGTERIKDSIVDFDFTGKIKILKGTKAEYQAKAVIVATGASPKKLDCPGEKELTGKGVSYCATCDADFFQDMEVFVVGGGDSAVEEAMYLTKFASKVTIVHRRDSLRAAKSIQDKAFANPKIDFKWDSVIKEIKGDGIVESVVFENTKTGELSEHFADEEFGTFGIFVFTGYIPQTDIFKDKVDMNQSGYFVTNQNMETNIPGVFAAGDCREKVLRQVVTATADGAIAAIMAEKYIEHEGL

SEQ ID NO: 244 - protein, 325 aa, Deinococcus radiodurans
MTAPTAHDYDVVIIGGGPAGLTAAIYTGRAQLSTLILEKGMPGGQIAWSEEVENFPGFPEPIAGMELAQRMHQQAEKFGAKVEMDEVQGVQHDATSHPYPFTVRGYNGEYRAKAVILATGADPRKLGIPGEDNFWGKGVSTCATCDGFFYKGKKVVVIGGGDAAVEEGMFLTKFADEVTVIHRRDTLRANKVAQARAFANPKMKFIWDTAVEEIQGADSVSGVKLRNLKTGEVSELATDGVFIFIGHVPNTAFVKDTVSLRDDGYVDVRDEIYTNIPMLFAAGDVSDYIYRQLATSVGAGTRAAMMTERQLAALEVEGEEVTAAD

SEQ ID NO: 245 - protein, 61 aa, Enterococcus faecalis
  VARIANT 33, 45, 46: Xaa = Any Amino Acid
MMDTLIIEKDKIGGQVTTTSEIVNYPAIRHTTXPELMGEMRIQAXXFGVAFTKDEIIDVDF

SEQ ID NO: 246 - protein, 205 aa, Halobacterium sp
MTEDSHDLVIAGSGIAGLSAAVYAARADLEPLVLEGDEPGGQLTLTTDVENYLGFPDGVGGMDLVQRGKEQAEQFGAQFEHGRIEAADLDGQPLELSLSTGDTLYTRSLIVATGASARWVGAENEDELMGAGLSTCATCDGAFHRGDDVLVVGGGDSAMEEALFLAKFADSVTVVHRREELRASEIMADRARDHDDVQFRWNTEL

SEQ ID NO: 247 - protein, 362 aa, Halobacterium sp
MTEATADRTALTDGGRDVVEHRQLVIVGSGIAALSAATYAARSNNDPLLFEGDEPGGQLTLTSEVENYPGFPEGIAGAELIQEMKTQATRFGAEVEHGIVESVDDSGRPFRLTLTNGDVYTADAVIVASGASARTLGIPGEDELMGQGVSTCATCDGAFFRGEDMIVVGGGDAAAEEASFLTKFADTVYLVHRRDELRAEDYWADRIREHVADGDIEVLWNTEAVEVHGSPEEGVTGASLVRHPEGHPTAKLDADETEQLELDIGAFFIAIGHTPNTSFLADTGVVCDDAGYVQTVGGAGGGQTKTDVTGVFGAGDVVDYHYQQAVTAAGMGSKAAIDADEYLESVADGVTGETADATPADD

SEQ ID NO: 248 - protein, 294 aa, Halobacterium
MPTQDGERRDVVIVGGGPAGCAAGVFTARYGLDTVVFDRGNAALPRCAFVENYPGFPGGIDVPTLRGLFHDHAETAGCDLIADTVESVDRPSDDDTGFVVETQDGRRVYTDTVLAAAWYDGSYLRPVVGDSAFETHDHHGESRERFDDAYADADGRTPVDGLYVASPGGQRSAQAVIAAGNGAHVARCLLADRKRARGYPEGVAPHYDWKRRESDLSGEWADRDRWREWFAAEAGDDHDLDDDEFAALRAAHLDRTFDATLSADAIEERAEAGAHRLLDHIDDDHIESYREQRD

SEQ ID NO: 249 - protein, 324 aa, Helicobacter pylori
MNQEILDVLIVGAGPGGIATAVECEIAGVKKVLLCEKTESHSGMLEKFYKAGKRIDKDYKKQVVELKGHIPFKDSFKEETLENFTNLLKEHHITPSYKTDIESVKKEGEYFKITTTSNTTYHAKFVVVAIGKMGQPNRPTAYKIPVALSKQVVFSINDCKENEKTLVIGGGNSAVEYAIALCKTTPTTLNYRKKEFSRINEDNAKNLQEVLNNNTLKSKLGVDIESLEEDNTQIKVNFTDNTSESFDRLLYAIGGSTPLEFFKRCSLELDPSTNIPVVKENLESNNIPNLFIVGDILFKSGASIATALNHGYDVAIEIAKRLHS

SEQ ID NO: 250 - protein, 128 aa, Klebsiella oxytoca
MGTAKHSKLLILGSGPAGYTAAVYAARANLQPVLITGMEKGGQLTTTTEVENWPGDPNDLTGPLLMERMHEHATKFETEIIFDHINSVDLQNRPFRLVGDSGEYTCDAPDYRYRRISALSGSAIGRRV

SEQ ID NO: 251 - protein, 79 aa, Lactococcus lactis
MQELDLIIVGAGPVGLYAAFYAGMRGLSVAIIESAQVPGGQPQNLYPEKLIYDIAGLPAVTGADLTKNLLEQLAQISHR

SEQ ID NO: 252 - protein, 321 aa, Lactococcus lactis
MQELDLIIVGAGPVGLYAAFYAGMRGLSVAIIESAQVPGGQPQNLYPEKLIYDIAGLPAVTGADLTKNLLEQLAQISHRLFLGESVQKIEKEEGIFSVTTDKSTRRAKGVLLTTGAGLLKPRKLGIDNEETLANEGKISYFITSLKEFEGKNVAVFGGGDSALDWSLMLEKVAKNVHLVHRRTAFRGHEITVDRVMNSNVQVHTPYTFSNLIENELELKKIKSEESLNFSIDKILVNYGFLTNQVTLAENLEVSRNGRVKADSMMQSNIEGLYVAGDASDYPGKMPLMSVGFGEAVHAINAMTKKLEFDHPLRGGHSSSIF

SEQ ID NO: 253 - protein, 308 aa, Lactococcus lactis
MTEKKYDVVIIGSGPAGMTAAMYTARSEMKTLLLERGVPGGQMNNTAEIENYPGYETIMGPELSMKMAEPLEGLGVENAYGFVTAIEDHGDYKKIITEDDEFVTKSIIIATGANHRKLEIPGEEEYGARGVSYCAVCDGAFFRNQEILVIGGGDSAVEEALYLTRFGQSVTIMHRRDKLRAQEIIQQRAFKEEKINFIWDSVPMEIKGDDKKVQSVVYKNVKTGEVTEKAFGGIFIYVGLDPVAEFAGNLGITDEAGWIITDDHMRTSLPGIFAVGDVRQKDFRQITTAIGDGAQAAQEAYKFVAELD

SEQ ID NO: 254 - protein, 44 aa, Lactococcus lactis
MQELDLIIVGAGPVGLYAAFYAGMRGLSVAIIESAQVPGGQPQN

SEQ ID NO: 255 - protein, 339 aa, Listeria monocytogenes
EFYSYKKEINRYLAEEDSASACDILRKVIDEKPNFWPAYNQLASLYFEQLKEEEGVRVLSDLLSRNPGNLLGICDLFIYHFYKGNRKEADELYLELRDVLPVLAHHKEKLGLIHAMMGEYEEADDLLEQVADLEVTERSKYYYFRAKSSYYLGDVEGAKMFWHSFLECDLYEDVRFPWEQEPDLTNDTRLVLEMLQEEDDLTHMLGVYALTISGNRPELVLFHPLLDMSDWSYMEHLMFTNFDYFPDGAIEQNGYLIAKAMIILKENGILLNEEYMALYKQMFSLVLIDAGKDLILGRYTIETVASAIAKLFLPHLKLQLVEEFECSKCARDIERVLSR

SEQ ID NO: 256 - protein, 303 aa, Methanothermobacter thermautotrophicus
MMTDYDMIVIGAGPAGLTAGIYGGRQGSSVLMLDKGPAGGLGLEVPMMENYPGFEMIAGMSLVTKMKKQATAVAELREMEEVKEIEKGDVFTVKTSRDTYTASAIIFATGSKHRQLGVPGENDLLGRGVCYCATCDGPLYKGRKVLMVGGGNSAAQEAVFLKNIGCDVSIVHRRDELRADKYLQDKLREMEIPVIWNSVVKEIGGDERVEEVIIHNRVTGRDETLKVDGVFIAIGEEPLNQLAVDLGVEVDKGGYIITDKFQRTNVPLVYAAGDITGGLNQWVTACAEGAIAATYAYREIQSY

SEQ ID NO: 257 - protein, 179 aa, Bacillus subtilis
MVISGGGDTAVDWANELEPIAASVTVVHRREEFGGMESSVTKMKQSSVRVLTPYRLEQLNGDEEGIKSVTVCHTESGQRKDIEIDELIINHGFKIDLGPMMEWGLEIEEGRVKADRHMRTNLPGVFVAGDAAFYESKLRLIAGGFTEGPTAVNSAKAYLDPKAENMAMYSTHHKKLVHK

SEQ ID NO: 258 - protein, 307 aa, Mycoplasma pulmonis
MSQNKIYDVAIIGAGPGALTAAIYTSRGNLDTVFIDNAAPGGKLIYASKIENWPGDTIVKGTDLAIRFFEHAQAFGAKYEYGKVVDLINIKDDLKELVLEDGKKIQAKSVIIASGMVSRKPREILNYDEFENRGVSYCVICDGPMYGHNPAIIIGGGNSAVEEGTFLSSIASKVYVIVRDSDFIAEKALVNDLKSRKNIEVLFNASVKELHGKDALEYAIVNHNGKEVKLEVASLFPYIGFLPSAEYAKNAGVLEPNGFIKTDEFMETKVPGIYAIGDIRIKDIRQILTATSDGTIAGKILTNRIKK

SEQ ID NO: 259 - protein, 316 aa, Neisseria meningitidis
MSQHRKLIILGSGPAGYTAAVYAARANLNPVIITGIAQGGQLMTTTEVDNWPADADGVQGTELMARFLAHAERFGTEIIFDQINAVDLQKRPFTLKGDMGEYTCDALIVATGASAKYLGLPSEEAFAGKGVSACATCDGFFYKNQDVAVVGGGNTAVEEALYLANIAKTVTLIHRRSEFRAEKIMIDKLMKRVEEGKIILKLESNLQEVLGDDRGVNGALLKNNDGSEQQIAVSGIFIAIGHKPNTDIFKGQLEMDEAGYLKTKGGTADNVGATNIEGVWAAGDVKDHTYRQAITSAASGCQAALDAERWLGSQNI

SEQ ID NO: 260 - protein, 316 aa, Neisseria meningitidis
MSQHRKLIILGSGPAGYTAAVYAARANLNPVIITGIAQGGQLMTTTEVDNWPADADGVQGPELMARFLAHAERFGTEIIFDQINAVDLQKRPFTLKGDMGEYTCDALIVATGASAKYLGLPSEEAFAGKGVSACATCDGFFYKNQDVAVVGGGNTAVEEALYLANIAKTVTLIHRRSEFRAEKIMIDKLMKRVEEGKIILKLESNLQEVLGDDRGVNGALLKNNDGSEQQIAVSGIFIAIGHKPNTDIFKGQLEMDEAGYLKTKGGTADNVGATNIEGVWAAGDVKDHTYRQAITSAASGCQAALDAERWLGSQNI

SEQ ID NO: 261 - protein, 316 aa, Pseudomonas aeruginosa
MSEVKHSRLIILGSGPAGYTAAVYAARANLKPVVITGIQPGGQLTTTTEVDNWPGDVEGLTGPALMTRMQQHAERFDTEIVYDHIHTAELQQRPFTLKGDSGTYTCDALIIATGASAQYLGMSSEEAFMGKGVSACATCDGFFYRNQVVCVVGGGNTAVEEALYLANIAKEVHLIHRRDKLRSEKILQDKLFDKAENGNVHLHWNTTLDEVLGDASGVTGVRLKSTIDGSTSELSLAGVFIAIGHKPNTDLFQGQLEMRDGYLRIHGGSEGNATQTSIEGVFAAGDVADHVYRQAITSAGAGCMAALDAEKYLDDH

SEQ ID NO: 262 - protein, 316 aa, Pseudomonas aeruginosa
MPDTLRHARVIILGSGPAGYSAAVYAARANLKPLLITGMQAGGQLTTTTEVDNWPGDPHGLTGPALMQRMQEHAERFETEIVFDHIHAVDLAGKPFTLRGDNGTYTCDALIVATGASARYLGLPSEQAFMGKGVSACATCDGFFYRNREVAVIGGGNTAVEEALYLANIASRVTLVHRRETFRAEKILQDKLQARVAEGKIVLKLNAEVDEVLGDTMGVTGVRLKTRDGGSEEIAVDGMFVAIGHTPNTSLFEGQLALKDGYLVVNGGREGNATATNVPGVFAAGDVADHVYRQAITSAGAGCMAALDVERYLDSL

SEQ ID NO: 263 - protein, 345 aa, Pyrococcus abyssi
MLLNIHQESYVEVVKMFSLGGLGKSRVDESKVWDVIIIGAGPAGYTAAIYAARFGLDTIIITKDLGGNMAITDLIENYPGFPEGISGSELAKRMYEHVKKYGVDVIFDEVVRIDPAECAYYEGPCQFEVKTANGKEYKGKTIIIAVGAEPRKLHVPGEKEFTGRGVSYCATCDGPLFVGKEVIVVGGGNTALQEALYLHSIGVKVTLVHRRDKFRADKILQDRLKQAGIPTILNTVVTEIRGTNKVESVVLKNVKTGETFEKKVDGVFIFIGYEPKTDFVKHLGITDEYGYIKVDMYMRTKVPGIFAAGDITNVFKQIAVAVGQGAIAANSAKEFIESWNGKSIE

SEQ ID NO: 264 - protein, 334 aa, Rickettsia prowazekii
MYNTDIVIIGSGPVGLFAVFQAGMLGMKCHVIDAQEVIGGQCITLYPEKHIYDIPAYPKIAAKELIKQLESQAAPFNPVYHLNQQATELNKHDDFFEIKTSKNTLIKSKVIIIAAGAGAFGPNKPPIANIEAFEGKSIFYFINDKSKFLGKNIVVAGGGDSAVDWAITLSEIANKIYLVHRRDKFTAATESVRQLRHIAETGKIELVTGYQLNNLDGHNSELRSVIVKDLQNNIRKLDANILLPFFGLKQDLGPLANWGFNVRLQHIEVDNYYYQTNIKGIYAIGDVAHYVGKLKLIITGFAEAACSLHHAYSRVFDGKALHFEYSTNKYEQKQ

SEQ ID NO: 265 - protein, 311 aa, Staphylococcus aureus
MTEIDFDIAIIGAGPAGMTAAVYASRANLKTVMIERGIPGGQMANTEEVENFPGFEMITGPDLSTKMFEHAKKFGAVYQYGDIKSVEDKGEYKVINFGNKELTAKAVIIATGAGYKKIGVPGEQELGGRGVSYCAVCDGAFFKNKRLFVIGGGDSAVEEGTFLTKFADKVTIVHRRDELRAQRILQDRAFKNDKIDFIWSHTLKSINEKDGKVGSVTLTSTKDGSEETHEADGVFIYIGMKPLTAPFKDLGITNDVGYIVTKDDMTTSVPGIFAAGDVRDKGLRQIVTATGDGSIAAQSTSGYIEHLNDQA

SEQ ID NO: 266 - protein, 326 aa, Streptomyces coelicolor
MSTAKDVRDVIVIGSGPAGYTAALYTARASLNPLVFGGAIFVGGSLTTTTEVENFPGFPDGVQGPELMENMRAQAERFGAEMVDDDIVAVDLTGDVKTVTDTAGTVHRARTVIVATGSGYRKLGVPKEDELSGRGVSWCATCDGFFFRDRDIVVVGGGDTAMEEATFLTRFARSVTVVHRRSALRASQVMQNRAFSEDKISLAFDSEVATLHEENGMLSGMTLRDTLTGETRELATTGLFIAIGHDPRTELFKGQLHLDSEGYLMVESPSTRTNVPGVFGAGDVVDHTYRQAITAASSGCAAALDAERYLAARSDTSVSAEVVAVA

SEQ ID NO: 267 - protein, 558 aa, Streptomyces coelicolor
MAQADGETRTVIMTVDDDPGVSRAVARDLRRRYGATYRIVRAESGESALDALRELKLRGDLVAVILADYRMPQMNGIEFLEQALDVYPGARRVLLTAYADTNAAIDAINVVDLDHYLLKPWDPPEEKLYPVLDDLLQAWRAGDHRPVPSTKVVGHRWSARSSEVREFLARNQVPYRWYSSDEPEGRRLLSAAGQDGQRLPVVITPDGTPLVEPEAPELAARVGLATTPTSDFYDLVVIGGGPAGLGAAVYGASEGLRTVLVERSATGGQAGQSSRIENYLGFPDGVSGGQLTERARRQAARFGAEILTAREVTGLEANGAARVVRFSDGSAIAAHSVILATGVSYRQLTAPGTEDLAGCGVFYGSALTEAASCQGHDVYIVGGANSAGQAAMYLARGAKSVTLLVRGGSLEASMSYYLIQQIEETPNIRVRCGTLVEGAHGDGHLERLTLRDAASGATELVDAQWLFVFIGAAPLTDWLDGTVLRDERGFILAGPDLTPDGRPPAGWELDRPPYHLETSVPGVFVAGDARAESAKRVASAVGEGAMAVMLVHRYLEQS

SEQ ID NO: 268 - protein, 303 aa, Streptococcus pneumoniae
MYDTIIIGAGPAGMTAALYAARSNLKVALIEGGLPGGQMNNTSDIENYPGYANISGPELAEKMFEPLENLGVEHIYGYVENVEDHGDFKKVMTDDQTYETRTVIVATGSKHRPLGVPGEEELNSRGVSYCAVCDGAFFRDQDLLVVGGGDSAVEEALFLTRFAKTVTIVHRRDQLRAQKVLQDRAFANEKISFIWDSVVREIKGENRVESVVFENVKTGQVTEQAFGGVFIYVGLDPLSDFVKELNIQDQAGWIVTDNHMKTAVDGIFAVGDVRLKDLRQVTTAVGDGAIAGQEAYKFITEHS

SEQ ID NO: 269 - protein, 330 aa, Streptococcus pyogenes
MKDKAYDITIIGGGPIGLFAAFYAGLRGVTVKIIESLSELGGQPAILYPEKMIYDIPAYPSLTGVELTENLIKQLSRFEDRTTICLKEEVLTFDKVKGGFSIRTNKAEHFSKAIIIACGNGAFAPRTLGLESEENFADHNLFYNVHQLDQFAGQKVVICGGGDSAVDWALALEDIAESVTVVHRRDAFRAHEHSVELLKASTVNLLTPYVPKALKGIGNLAEKLVIQKVKEDEVLELELDSLIVSFGFSTSNKNLKNWNLDYKRSSITVSPLFQTSQEGIFAIGDAAAYNGKVDLIATGFGEAPTAVNQAINYIYPDRDNRVVHSTSLID

SEQ ID NO: 270 - protein, 325 aa, Sulfolobus solfataricus
MPLKTYDTIIVGAGIAGLSAALYSSRQKLSTLVLSKDLGGQLTLTDLIENYPGIESTGGLTLAQKIEKQAKKFGAEFIYGEEVKEIAQESDLFIIKGIKGEYAGRALILAFGKTPREINVPGEQEFKGKGVSYCAICDAAFFKGKPAAVIGEGEPGIEAIELLSNYANPAYYITSSSYLAGEEEIVKNVVNKPTVKILTSSRVLEIRGNSKVEELVIKRGDEILQLKVDGVIIEMGYTLKTEFLKGFVELNEKGEIIVDELGRTSREGVFAAGDVTQTPYKQAVVAAAEGVKAALSAYNYIRSKRGLPPVTVDWKAEKKKVSFRL

SEQ ID NO: 271 - protein, 323 aa, Sulfolobus solfataricus
MSLLPRTTSVKPGEKFDVIIVGLGPAAYGAALYSARYMLKTLVIGETPGGQLTEAGIVDDYLGLIEIQASDMIKVFNKHIEKYEVPVLLDIVEKIENRGDEFVVKTKRKGEFKADSVILGIGVKRRKLGVPGEQEFAGRGISYCSVCDAPLFKNRVVAVIGGGDSALEGAEILSSYSTKVYLIHRRDTFKAQPIYVETVKKKPNVEFVLNSVVKEIKGDKVVKQVVVENLKTGEIKELNVNGVFIEIGFDPPTDFAKSNGIETDTNGYIKVDEWMRTSVPGVFAAGDCTSAWLGFRQVITAVAQGAVAATSAYRYVTEKKGKK

SEQ ID NO: 272 - protein, 332 aa, Sulfolobus solfataricus
MDEYDIVVIGGGPVGLFGTFYAGLRDMKTLLIDAQDELGGQLVSLYPEKIVYDVGGLAGIQAYELAQRLIEQAKMFGPDIKVNELADMIEKTNDNMWIVKTDKATYKTKTIFIAAGIGKIVPSRLGAKGEIEYENRGVYYTVRRKKDFEGKRVLIVGGGDSAVDWALTLAPVAKSVTLIHRRDQFRAHERSVKELFRVANVYVWHELKEVKGDGNKVTQAIIFDNRTKEEKVLDVDSVIISIGYKGDLGNIPKWGVTMKGRDIVVNGRMETNLPGVYAGGDIVQMEGSPKLALIAVGFAHAAIAISVAKKYVEPNASLFAGHSSEMDKFKPK

SEQ ID NO: 273 - protein, 324 aa, Rhizobium loti
MTTKHAPVLIIGSGPAGYTAAVYAARAMLKPMLVAGLQQGGQLMITTDVENYPGFADPIQGPWLMEQMMKQAEHVGTDIINDIITEVDLNVRPFRAKGDSGTTYTADALIIATGAQAKWLGIPTEQDFMGFGVSACATCDGFFYRGKDVAVVGGGNSAVEEALYLSNLAKSVTVIHRRSDFRAERILRERLLQKDNVRVIWDTVVDEITGRPGKAPLPPSVEGLKLKHAVTGAETHLKVDGVFVAIGHAPAVELFVGKLKQKPNGYLWTAPNSTRTDVPGVFAAGDVTDDVYRQAVTAAGLGCMAALEAEKYLAGIEVHREAAE

SEQ ID NO: 274 - protein, 343 aa, Rhizobium loti
MTGIISTDVLIVGAGPVGLFAVFELGLFDMKCHLIDILDKPGGQCAELYPEKPIYDIPGWPSISAQGLVDKLLEQIHPFKPDFTYNRMVSSLEKLEDGSFRVTTDENEVFEAKVVVIAAGGGSFQPKRPPIPGIEPYEGKSVFYSVRRMEDFRGHDLVIVGGGDSALDWTLNLQPVAKSVTLVHRRPEFRAAPDSVNKMYAMQEMKQLEFRVGQVTGLTGADGQLSSATIKGGPDGDIEVPCTRMLPFFGLTMKLGPIAEWGLNLHENLIPVDTEKFQTSVPGIFAVGDINSYPGKLKLILSGFHEVALMAQAAKRIVSPGERIVFQYTTSSTSLQKKLGVVG

SEQ ID NO: 275 - protein, 15 aa, Saccharomyces cerevisiae
  VARIANT 9, 11: Xaa = Any Amino Acid
VHNIVTIIXSXPAAH

SEQ ID NO: 276 - protein, 104 aa, Staphylococcus aureus
MAIVKVTDADFDSKVESGVQLVDFWATWCGPCKMIAPVLEELAADYEGKADILKLDVDENPSTAAKYEVMSIPTLIVFKDGQPVDKVVGFQPKENLAEVLDKHL

SEQ ID NO: 277 - protein, 92 aa, Staphylococcus xylosus
MAEQVDFDIAIIGAGPAGMTAAVYASRANLSTVMIERGMPGGQMANTEEVENFPGFEMVTGPDLSTKMFEHAKKFGAKYQYGDIKSIEDKGS

SEQ ID NO: 278 - protein, 319 aa, Thermoplasma acidophilum
MEFNLHAVSSEEKERDFDVVIVGAGAAGFSAAVYAARSGFSVAILDKAVAGGLTAEAPLVENYLGFKSIVGSELAKLFADHAANYAKIREGVEVRSIKKTQGGFDIETNDDTYHAKYVIITTGTTHKHLGVKGESEYFGKGTSYCSTCDGYLFKGKRVVTIGGGNSGAIAAISMSEYVKNVTIIEYMPKYMCENAYVQEIKKRNIPYIMNAQVTEIVGDGKKVTGVKYKDRTTGEEKLIETDGVFIYVGLIPQTSFLKDSGVKLDERGYIVVDSRQRTSVPGVYAAGDVTSGNFAQIASAVGDGCKAALSLYSDSISKK

SEQ ID NO: 279 - protein, 317 aa, Thermotoga maritima
MVFFDTGSLKKKEIKDKYDIVVVGGGPAGLTSAIYARRAGLSVLVVEKAIEGGYVNLTHLVENYPGFPAISGEELASKFKEHAEKFGADIYNAEVVKLEVQGDKKVVELDDGKRIEAPVVIVATGANPKKLNVPGEKEFFGKGVSYCATCDGYLFAGKDVIVVGGGDSACDESIFLSNIVNKITMIQLLETLTAAKVLQERVLNNPKIEVIYNSTVREIRGKDKVEEVVIENVKTGETKVLKADGVFIFIGLDPNSKLLEGLVELDPYGYVITDENMETSVKGIYAVGDVRKKNLRQIVTAVADGAIAVEHAAKHYF

SEQ ID NO: 280 - protein, 326 aa, Thermoplasma volcanium
MNLYRGMEFNLRSVSTEAKERDFDVIIIGAGAAGFSAAVYASRSGLSAVILDKNVAGGLTAEAPLVENYLGFKSIVGSDLAKNFAEHASEYASIREGVEVKSVKKGDGGFIVDTSDGEYHSKYIIITTGTTHKHLGVKGEAEYFGKGVSYCSTCDGYLFKNKNVVTIGGGNSGAIAAISMSEYVKNATIVEYMPRYMCENAYIEEIKKRKIPYIMNAQVTEIVGDGKKVTGVKYKDRSSGEEKTLPADGVFVYVGLIPQTSFLKDSGVKLDERGYIIVDGRQRTNVPGIYAAGDVTSGSFAQIASAVGDGCKAALSLYSDTISSKK

SEQ ID NO: 281 - protein, 309 aa, Ureaplasma parvum
MNQEVYDLVIIGAGPAGLAAAVYAKRSGLNVIIVEKQFPGGKIALTSNVENYLGINSIPGPELAYKMYEQVLNLNVSIIYEAADEISLKEKYKKIKLTTQTLITKTVIIATGTENRRLNILGELEFENKGISYCAICDGPLYKNKAVSVIGSGNSAVEEAIYLATIAKEVHLIANKPQFKAEQQLVQIANNTPNIKIYYNKQTFEFFGHQFLEGLKFRDLITNEVTTLNIEANFTFIGLLPSRINTNNLCIFNEVNGFITTDKNMQTSVCGIFAAGDIVDKNVRQIATATNDGVIAALYAKEYITRNNW

SEQ ID NO: 282 - protein, 318 aa, Vibrio cholerae
MSNVKHSKLLILGSGPAGYTAAVYAARANLKPVLVTGMQQGGQLTTTTEVENWPGDAEGLTGPALMERMKEHAERFDTEIVFDHINSVDLSSRPFRLTGDSQEYTCDALIISTGASAKYLGLESEEAFKGRGVSACATCDGFFYRNQKVAVVGGGNTAVEEALYLSNIASEVHLVHRRDSFRSEKILIDRLMDKVANGNIVLHTHRTLDEVLGDEMGVTGVRLKDTQSDMTENLDVMGVFIAIGHQPNSQIFEGQLEMKNGYIVVKSGLEGNATQTSIEGVFAAGDVMDHNYRQAITSAGTGCMAALDAERYLDSQGK

SEQ ID NO: 283 - protein, 321 aa, Xylella fastidiosa
MSDYPASAKHSRLLILGSGPAGWTAAVYAARANLQPVLITGLQQGGQLMTTTEVDNWPGDAHGLMGPDLMERMQAHAERFDTKVIFDQIYKADLSTRPFTLFGDSGLYTCDGLIIATGANAKYLGIPSEEAFKGRGVSACATCDGFFYRDQDVAVIGGGNTAVEEALYLSNIARKVYLIHRRDKLRAEKIMQNKLFSKAATGKIELIWNNAVEEVLGNDASVTGVRIRSTQDSSTRDIDVQGLFVAIGHHPNTDLFAGQLAMNNGYLQIHSGTAGNVTQTSVEGVFAAGDVADQHYRQAITSAGFGCMAALDAERFLDKGN

SEQ ID NO: 284 - protein, 318 aa, Zymomonas mobilis
MSADPISTRVFILGSGPAGLTAAIYAARAGLNPIVAQGLQPGGQLTITTEVENFPGFREPIQGPWLMEEMQAQAENVGAKLVWDIITSVDFSQRPYRLMGDGGQVYLADSLIISTGAQARWLGLESETALRGKGISACATCDGFFFRGKKVVVIGGGNTAVEEALYLTNHSPEVTLIHRRDSLRAEKIMQKRLLANPKIKIRWNSEVAEFIAGEDSALSAVKLKDTKTGEESLLETEGAFIAIGHKPATELFQGHLKLDDEGYIEVTPGTTQTSIKGIFACGDVMDKHYRQAVTAAGTGCMAALEAERFLGEIDFKED

SEQ ID NO: 285 - protein, 122 aa, Bos taurus
KLMHQAALLGQALTDSRKFGWEYSQQVRHSWATMTEAIQSHIGSLSWGHRLALREKAVTYVNSFGEFVEHHKVKATNEKGQEVLYTAAKFVIATGERPRYLGIPGDREYCITSDDLFSLPYC

SEQ ID NO: 286 - protein, 511 aa, Bos taurus
MAALRGAAARFRGRAPGGARGAAGRQCYDLLVIGGGSGGLACAKEAAQLGKKVAVLDYVEPSPQGTRWGLGGTCVNVGCIPKKLMHQAALLGGMIRDAPHYGWGVAQAPHSWATLADAVQNHVKSLNWGHRIQLQDRKVKYFNVKASFVDTHTVCGVSKGGEETLLSAEHIVIATGGRPRYPTHIEGALEYGITSDDLFWLKESPGKTLVVGASYVALECAGLLTGLGLDTTVMIRSVPLRAFDQQMASLVTEHMAGHGTRILRGCAPEKVEKLPGQQLRVTWVDLTSDRKDAGTFDTVLWAIGRVPETASLNLEKAGVHTNPVTGKILVDAQETTSVPHIYAIGDVAEGRPELTPTAIMAGRLLAQRLSGRTSDLMDYSSVPTTVFTPLEYGCVGLSEEAAVARHGEEHVEVYHAFYKPLEFTVPQRDASQCYIKMVCLREPPQLVLGLHFLGPNAGEVIQGFALGIKCGASYQQLMRTVGIHPTCAEEVAKLRISKRSGLDPTVTGCCG

SEQ ID NO: 287 - protein, 525 aa, Caenorhabditis elegans
  VARIANT 524: Xaa = Any Amino Acid
MYIKGNAVGGLKELKALKQDYLKEWLRDHTYDLIVIGGGSGGLAAAKEASRLGKKVACLDFVKPSPQGTSWGLGGTCVNVGCIPKKLMHQASLLGHSIHDAKKYGWKLPEGKVEHQWNHLRDSVQDHIASLNWGYRVQLREKTVTYINSYGEFTGPFEISATNKKKKVEKLTADRFLISTGLRPKYPEIPGVKEYTITSDDLFQLPYSPGKTLCVGASYVSLECAGFLHGFGFDVTVMVRSILLRGFDQDMAERIRKHMIAYGMKFEAGVPTRIEQIDEKTDEKAGKYRVFWPKKNEETGEMQEVSEEYNTILMAIGREAVTDDVGLTTIGVERAKSKKVLGRREQSTTIPWVYAIGDVLEGTPELTPVAIQAGRVLMRRIFDGANELTEYDQIPTTVFTPLEYGCCGLSEEDAMMKYGKDNIIIYHNVFNPLEYTISERMDKDHCYLKMICLRNEEEKVVGFHILTPNAGEVTQGFGIALKLAAKKADFDRLIGIHPTVAENFTTLTLEKKEGDEELQASGCXG

SEQ ID NO: 288 - protein, 667 aa, Caenorhabditis elegans
  VARIANT 666: Xaa = Any Amino Acid
MKSLTELFGCFKRQPRQQEASSPANPHVSDTLSMGVAASGMPPPKRPAPAESPTLPGETLVDAPGIPLKEALKEAANSKIVIFYNSSDEEKQLVEFETYLNSLKEPADAEKPLEIPEIKKLQVSRASQKVIQYLTLHTSWPLMYIKGNAVGGLKELKALKQDYLKEWLRDHTYDLIVIGGGSGGLAAAKEASRLGKKVACLDFVKPSPQGTSWGLGGTCVNVGCIPKKLMHQASLLGHSIHDAKKYGWKLPEGKVEHQWNHLRDSVQDHIASLNWGYRVQLREKTVTYINSYGEFTGPFEISATNKKKKVEKLTADRFLISTGLRPKYPEIPGVKEYTITSDDLFQLPYSPGKTLCVGASYVSLECAGFLHGFGFDVTVMVRSILLRGFDQDMAERIRKHMIAYGMKFEAGVPTRIEQIDEKTDEKAGKYRVFWPKKNEETGEMQEVSEEYNTILMAIGREAVTDDVGLTTIGVERAKSKKVLGRREQSTTIPWVYAIGDVLEGTPELTPVAIQAGRVLMRRIFDGANELTEYDQIPTTVFTPLEYGCCGLSEEDAMMKYGKDNIIIYHNVFNPLEYTISERMDKDHCYLKMICLRNEEEKVVGFHILTPNAGEVTQGFGIALKLAAKKADFDRLIGIHPTVAENFTTLTLEKKEGDEELQASGCXG

SEQ ID NO: 289 - protein, 516 aa, Drosophila melanogaster
MSTIKFLRSSTHNALRSSLGWCRLAASRPRYDYDLVVLGGGSAGLACAKEAAGCGARVLCFDYVKPTPVGTKWGIGGTCVNVGCIPKKLMHQASLLGEAVHEAVAYGWNVDDTNIRPDWRKLVRSVQNHIKSVNWVTRVDLRDKKVEYVNSMATFRDSHTIEYVAMPGAEHRQVTSEYVVVAVGGRPRYPDIPGAVELGITSDDIFSYEREPGRTLVVGAGYVGLECACFLKGLGYEPTVMVRSIVLRGFDRQMSELLAAMMTERGIPFLGTTIPKAVERQADGRLLVRYRNTTTQMDGSDVFDTVLWAIGRKGLIEDLNLDAAGVKTHDDKIVVDAAEATSVPHIFAVGDIIYGRPELTPVAILSGRLLARRLFAGSTQLMDYADVATTVFTPLEYSCVGMSEETAIELRGADNIEVFHGYYKPTEFFIPQKSVRHCYLKAVAEVSGDQKILGLHYIGPVAGEVIQGFAAALKTGLTVKTLLNTVGIHPTTAEEFTRLSITKRSGRDPTPASCCS

SEQ ID NO: 290 - protein, 524 aa, Homo sapiens
  VARIANT 523: Xaa = Any Amino Acid
MAAMAVALRGLGGRFRWRTQAVAGGVRGAARGAAAGQRDYDLLVVGGGSGGLACAKEAAQLGRKVSVVDYVEPSPQGTRWGLGGTCVNVGCIPKKLMHQAALLGGLIQDAPNYGWEVAQPVPHDWRKMAEAVQNHVKSLNWGHRVQLQDRKVKYFNIKASFVDEHTVCGVAKGGKEILLSADHIIIATGGRPRYPTHIEGALEYGITSDDIFWLKESPGKTLVVGASYVALECAGFLTGIGLDTTIMMRSIPLRGFDQQMSSMVIEHMASHGTRFLRGCAPSRVRRLPDGQLQVTWEDSTTGKEDTGTFDTVLWAIGRVPDTRSLNLEKAGVDTSPDTQKILVDSREATSVPHIYAIGDVVEGRPELTPIAIMAGRLLVQRLFGGSSDLMDYDNVPTTVFTPLEYGCVGLSEEEAVARHGQEHVEVYHAHYKPLEFTVAGRDASQCYVKMVCLREPPQLVLGLHFLGPNAGEVTQGFALGIKCGASYAQVMRTVGIHPTCSEEVVKLRISKRSGLDPTVTGCXG

SEQ ID NO: 291 - protein, 497 aa, Homo sapiens [sequence omitted]

SEQ ID NO: 292 - protein, 497 aa, Homo sapien [sequence omitted]

SEQ ID NO: 293 - protein, 521 aa, Homo sapiens
  VARIANT 520: Xaa = Any Amino Acid
MAVALRGLGGRFRWRTQAVAGGVRGAARGAAAGQRDYDLLVVGGGSGGLACAKEAAQLGRKVAVVDYVEPSPQGTRWGLGGTCVNVGCIPKKLMHQAALLGGLIQDAPNYGWEVAQPVPHDWRKMAEAVQNHVKSLNWGHRVQLQDRKVKYFNIKASFVDEHTVCGVAKGGKEILLSADHIIIATGGRPRYPTHIEGALEYGITSDDIFWLKESPGKTLVVGASYVALECAGFLTGIGLDTTIMMRSIPLRGFDQQMSSMVIEHMASHGTRFLRGCAPSRVRRLPDGQLQVTWEDSTTGKEDTGTFDTVLWAIGRVPDTRSLNLEKAGVDTSPDTQKILVDSREATSVPHIYAIGDVVEGRPELTPIAIMAGRLLVQRLFGGSSDLMDYDNVPTTVFTPLEYGCVGLSEEEAVARHGQEHVEVYHAHYKPLEFTVAGRDASQCYVKMVCLREPPQLVLGLHFLGPNAGEVTQGFALGIKCGASYAQVMRTVGIHPTCSEEVVKLRISKRSGLDPTVTGCXG

SEQ ID NO: 294 - protein, 579 aa, Homo sapiens
  VARIANT 578: Xaa = Any Amino Acid
AERVVIFSKSYCPHSTRVKELFSSLGVECNVLELDQVDDGARVQEVLSEITNQKTVPNIFVNKVHVGGCDQTFQAYQSGLLQKLLQEDLAYDYDLIIIGGGSGGLSCAKEAAILGKKVMVLDFVVPSPQGTSWGLGGTCVNVGCIPKKLMHQAALLGQALCDSRKFGWEYNQQVRHNWETMTKAIQNHISSLNWGYRLSLREKAVAYVNSYGEFVEHHKIKATNKKGQETYYTAAQFVIATGERPRYLGIQGDKEYCITSDDLFSLPYCPGKTLVVGASYVALECAGFLAGFGLDVTVMVRSILLRGFDQEMAEKVGSYMEQHGVKFLRKFIPVMVQQLEKGSPGKLKVLAKSTEGTETIEGVYNTVLLAIGRDSCTRKIGLEKIGVKINEKSGKIPVNDVEQTNVPYVYAVGDILEDKPELTPVAIQSGKLLAQRLFGASLEKCDYINVPTTVFTPLEYGCCGLSEEKAIEVYKKENLEIYHTLFWPLEWTVAGRENNTCYAKIICNKFDHDRVIGFHILGPNAGEVTQGFAAAMKCGLTKQLLDDTIGIHPTCGEVFTTLEITKSSGLDITQKGCXG

SEQ ID NO: 295 - protein, 524 aa, Homo sapien
  VARIANT 523: Xaa = Any Amino Acid
MAAMAVALRGLGGRFRWRTQAVAGGVRGAARGAAAGQRDYDLLVVGGGSGGLACAKEAAQLGRKVAVVDYVEPSPQGTRWGLGGTCVNVGCIPKKLMHQAALLGGLIQDAPNYGWEVAQPVPHDWRKMAEAVQNHVKSLNWGHRVQLQDRKVKYFNIKASFVDEHTVCGVAKGGKEILLSADHIIIATGGRPRYPTHIEGALEYGITSDDIFWLKESPGKTLVVGASYVALECAGFLTGIGLDTTIMMRSIPLRGFDQQMSSMVIEHMASHGTRFLRGCAPSRVRRLPDGQLQVTWEDSTTGKEDTGTFDTVLWAIGRVPDTRSLNLEKAGVDTSPDTQKILVDSREATSVPHIYAIGDVVEGRPELTPIAIMAGRLLVQRLFGGSSDLMDYDNVPTTVFTPLEYGCVGLSEEEAVARHGQEHVEVYHAHYKPLEFTVAGRDASQCYVKMVCLREPPQLVLGLHFLGPNAGEVTQGFALGIKCGASYAQVMRTVGIHPTCSEEVVKLRISKRSGLDPTVTGCXG

SEQ ID NO: 296 - protein, 577 aa, Homo sapien
  VARIANT 576: Xaa = Any Amino Acid
RVVIFSKSYCPHSTRVKELFSSLGVECNVLELDQVDDGARVQEVLSEITNQKTVPNIFVNKVHVGGCDQTFQAYQSGLLQKLLQEDLAYDYDLIIIGGGSGGLSCAKEAAILGKKVMVLDFVVPSPQGTSWGLGGTCVNVGCIPKKLMHQAALLGQALCDSRKFGWEYNQQVRHNWETMTKAIQNHISSLNWGYRLSLREKAVAYVNSYGEFVEHHKIKATNKKGQETYYTAAQFVIATGERPRYLGIQGDKEYCITSDDLFSLPYCPGKPLVVGASYVALECAGFLAGFGLDVTVMVRSILLRGFDQEMAEKVGSYMEQHGVKFLRKFIPVMVQQLEKGSPGKLKVLAKSTEGTETIEGVYNTVLLAIGRDSCTRKIGLEKIGVKINEKSGKIPVNDVEQTNVPYVYAVGDILEDKPELTPVAIQSGKLLAQRLFGASLEKCDYINVPTTVFTPLEYGCCGLSEEKAIEVYKKENLEIYHTLFWPLEWTVAGRENNTCYAKIICNKFDHDRVIGFHILGPNAGEVTQGFAAAMKCGLTKQLLDDTIGIHPTCGEVFTTLEITKSSGLDITQKGCXG

SEQ ID NO: 297 - protein, 494 aa, Homo sapien
MEDQAGQRDYDLLVVGGGSGGLACAKEAAQLGRKVAVVDYVEPSPQGTRWGLGGTCVNVGCIPKKLMHQAALLGGLIQDAPNYGWEVAQPVPHDWRKMAEAVQNHVKSLNWGHRVQLQDRKVKYFNIKASFVDEHTVCGVAKGGKEILLSADHIIIATGGRPRYPTHIEGALEYGITSDDIFWLKESPGKTLVVGASYVALECAGFLTGIGLDTTIMMRSIPLRGFDQQMSSMVIEHMASHGTRFLRGCAPSRVRRLPDGQLQVTWEDSTTGKEDTGTFDTVLWAIGRVPDTRSLNLEKAGVDTSPDTQKILVDSREATSVPHIYAIGDVVEGRPELTPTAIMAGRLLVQRLFGGSSDLMDYDNVPTTVFTPLEYGCVGLSEEEAVARHGQEHVEVYHAHYKPLEFTVAGRDASQCYVKMVCLREPPQLVLGLHFLGPNAGEVTQGFALGIKCGASYAQVMRTVGIHPTCSEEVVKLRISKRSGLDPTVTGCCG

SEQ ID NO: 298 - protein, 521 aa, Homo sapien [sequence omitted]

SEQ ID NO: 299 - protein, 549 aa, Homo sapien
MSCEDGRALEGTLSELAAETDLPVVFVKQRKIGGHGPTLKAYQEGRLQKLLKMNGPEDLPKSYDYDLIIIGGGSGGLAAAKEAAQYGKKVMVLDFVTPTPLGTRWGLGGTCVNVGCIPKKLMHQAALLGQALQDSRNYGWKVEETVKHDWDRMIEAVQNHIGSLNWGYRVALREKKVVYENAYGQFIGPHRIKATNNKGKEKIYSAERFLIATGERPRYLGIPGDKEYCISSDDLFSLPYCPGKTLVVGASYVALECAGFLAGIGLDVTVMVRSILLRGFDQDMANKIGEHMEEHGIKFIRQFVPIKVEQIEAGTPGRLRVVAQSTNSEEIIEGEYNTVMLAIGRDACTRKIGLETVGVKINEKTGKIPVTDEEQTNVPYIYAIGDILEDKVELTPVAIQAGRLLAQRLYAGSTVKCDYENVPTTVFTPLEYGACGLSEEKAVEKFGEENIEVYHSYFWPLEWTIPSRDNNKCYAKIICNTKDNERVVGFHVLGPNAGEVTQGFAAALKCGLTKKQLDSTIGIHPVCAEVFTTLSVTKRSGASILQAGC

SEQ ID NO: 300 - protein, 613 aa, Mus musculus
  VARIANT 612: Xaa = Any Amino Acid
MPVDDCWLYFPASRGRTFVQTVWVAPTCPNCCWFPGFLPPVPRPPHVPRVLLRGPRGAVLPASRPSKTLPSSSQTPCPTDPCICPPPSTPDSRQEKNTQSELPNKKGQLQKLPTMNGSKDPPGSYDFDLIIIGGGSGGLAAAKEAAKFDKKVLVLDFVTPTPLGTRWGLGGTCVNVGCIPKKLMHQAALLGQALKDSRNYGWKVEDTVKHDWEKMTESVQSHIGSLNWGYRVALREKKVVYENAYGRFIGPHRIVATNNKGKEKIYSAERFLIATGERPRYLGIPGDKEYCISSDDLFSLPYCPGKTLVVGASYVALECAGFLAGIGLDVTVMVRSILLRGFDQDMANKIGEHMEEHGIKFIRQFVPTKIEQIEAGTPGRLRVTAQSTNSEETIEGEFNTVLLAVGRDSCTRTIGLETVGVKINEKTGKIPVTDEEQTNVPYIYAIGDILEGKLELTPVAIQAGRLLAQRLYGGSNVKCDYDNVPTTVFTPLEYGCCGLSEEKAVEKFGEENIEVYHSFFWPLEWTVPSRDNNKCYAKIICNLKDDERVVGFHVLGPNAGEVTQGFAAALKCGLTKQQLDSTIGIHPVCAEIFTTLSVTKRSGGDILQSGCXG

SEQ ID NO: 301 - protein, 310 aa, Mus musculus
MNGSKDPPGSYDFDLIIIGGGSGGLAAAKEAAKFDKKVLVLDFVTPTPLGTRWGLGGTCVNVGCIPKKLMHQAALLGQALKDSRNYGWKVEDTVKHDWEKMTESVQSHIGSLNWGYRVALREKKVVYENAYGRFIGPHRIVATNNKGKEKIYSAERFLIATGERPRYLGIPGDKEYCISSDDLFSLPYCPGKTLVVGASYVALECAGFLAGIGLDVTVMVRSILLRGFDQDMANKIGEHMEEHGIKFIRQFVPTKIEQIEAGTPGRLRVTAQSTNSEETIEGEFNTVLLAVGRDSCTRTIGLETVGVKIN

SEQ ID NO: 302 - protein, 613 aa, Mus musculus
MSSPPGRRARLASPGTSRPSSEAREELRRRLRDLIEGNRVMIFSKSYCPHSTRVKELFSSLGVVYNILELDQVDDGASVQEVLTEISNQKTVPNIFVNKVHVGGCDRTFQAHQNGLLQKLLQDDSAHDYDLIIIGGGSGGLSCAKEAANLGKKVMVLDFVVPSPQGTTWGLGGTCVNVGCIPKKLMHQAALLGHALQDAKKYGWEYNQQVKHNWEAMTEAIQSHIGSLNWGYRVTLREKGVTYVNSFGEFVDLHKIKATNKKGQETFYTASKFVIATGERPRYLGIQGDKEYCITSDDLFSLPYCPGCTLVVGASYVGLECAGFLAGLGLDVTVMVRSVLLRGFDQEMAEKVGSYLEQQGVKFQRKFTPILVQQLEKGLPGKLKVVAKSTEGPETVEGIYNTVLLAIGRDSCTRKIGLEKIGVKINEKNGKIPVNDVEQTNVPHVYAIGDILDGKPELTPVAIQAGKLLARRLFGVSLEKCDYINIPTTVFTPLEYGCCGLSEEKAIEMYKKENLEVYHTLFWPLEWTVAGRDNNTCYAKIICNKFDNERVVGFHLLGPNAGEITQGFAAAMKCGLTKQLLDDTIGIHPTCGEVFTTLEITKSSGLDITQKGC

SEQ ID NO: 303 - protein, 524 aa, Mus musculus
  VARIANT 523: Xaa = Any Amino Acid
MVAAMVAALRGPSRRFRPRTRALTRGTRGAASAAGGQQSFDLLVIGGGSGGLACAKEAAQLGKKVAVADYVEPSPRGTKWGLGGTCVNVGCIPKKLMHQAALLGGMIRDAHHYGWEVAQPVQHNWKTMAEAVQNHVKSLNWGHRVQLQDRKVKYFNIKASFVDEHTVRGVDKGGKATLLSAEHIVIATGGRPRYPTQVKGALEYGITSDDIFWLKESPGKTLVVGASYVALECAGFLTGIGLDTTVMMRSIPLRGFDQQMSSLVTEHMESHGTQFLKGCVPSHIKKLPTNQLQVTWEDHASGKEDTGTFDTVLWAIGRVPETRTLNLEKAGISTNPKNQKIIVDAQEATSVPHIYAIGDVAEGRPELTPTAIKAGKLLAQRLFGKSSTLMDYSNVPTTVFTPLEYGCVGLSEEEAVALHGQEHVEVYHAYYKPLEFTVADRDASQCYIKMVCMREPPQLVLGLHFLGPNAGEVTQGFALGIKCGASYAQVMQTVGIHPTCSEEVVKLHISKRSGLEPTVTGCXG

SEQ ID NO: 304 - protein, 528 aa, Mus musculus
  VARIANT 527: Xaa = Any Amino Acid
MAAMVAGRMWAALRGPSRRFRPRTRALTRGTRGAASAAGGQQSFDLLVIGGGSGGLACAKEAAQLGKKVAVADYVEPSPRGTKWGLGGTCVNVGCIPKKLMHQAALLGGMIRDAHHYGWEVAQPVQHNWKTMAEAVQNHVKSLNWGHRVQLQDRKVKYFNIKASFVDEHTVRGVDKGGKATLLSAEHIVIATGGRPRYPTQVKGALEYGITSDDIFWLKESPGKTLVVGASYVALECAGFLTGIGLDTTVMMRSIPLRGFDQQMSSLVTEHMESHGTQFLKGCVPSHIKKLPTNQLQVTWEDHASGKEDTGTFDTVLWAIGRVPETRTLNLEKAGISTNPKNQKIIVDAQEATSVPHIYAIGDVAEGRPELTPTAIKAGKLLAQRLFGKSSTLMDYSNVPTTVFTPLEYGCVGLSEEEAVALHGQEHVEVYHAYYKPLEFTVADRDASQCYIKMVCMREPPQLVLGLHFLGPNAGEVTQGFALGIKCGASYAQVMQTVGIHPTCSEEVVKLHISKRSGLEPTVTGCXG

SEQ ID NO: 305 - protein, 520 aa, Mus musculus
MVAALRGPSRRFRPRTRALTRGTRGAASAAGGQQSFDLLVIGGGSGGLACAKEAAQLGKKVAVADYVEPSPRGTKWGLGGTCVNVGCIPKKLMHQAALLGGMIRDAHHYGWEVAQPVQHNWKTMAEAVQNHVKSLNWGHRVQLQDRKVKYFNIKASFVDEHTVRGVDKGGKATLLSAEHIVIATGGRPRYPTQVKGALEYGITSDDIFWLKESPGKTLVVGASYVALECAGFLTGIGLDTTVMMRSIPLRGFDQQMSSLVTEHMESHGTQFLKGCVPSHIKKLPTNQLQVTWEDHASGKEDTGTFDTVLWAIGRVPETRTLNLEKAGISTNPKNQKIIVDAQEATSVPHIYAIGDVAEGRPELTPTAIKAGKLLAQRLFGKSSTLMDYSNVPTTVFTPLEYGCVGLSEEEAVALHGQEHVEVYHAYYKPLEFTVADRDASQCYIKMVCMREPPQLVLGLHFLGPNAGEVTQGFALGIKCGASYAQVMQTVGIHPTCSEEVVKLHISKRSGLEPTVTGCCG

SEQ ID NO: 306 - protein, 499 aa, Mus musculus
MNGSKDPPGSYDFDLIIIGGGSGGLAAAKEAAKFDKKVLVLDFVTPTPLGTRWGLGGTCVNVGCIPKKLMHQAALLGQALKDSRNYGWKVEDTVKHDWEKMTESVQSHIGSLNWGYRVALREKKVVYENAYGRFIGPHRIVATNNKGKEKIYSAERFLIATGERPRYLGIPGDKEYCISSDDLFSLPYCPGKTLVVGASYVALECAGFLAGIGLDVTVMVRSILLRGFDQDMANKIGEHMEEHGIKFIRQFVPTKIEQIEAGTPGRLRVTAQSTNSEETIEGEFNTVLLAVGRDSCTRTIGLETVGVKINEKTGKIPVTDEEQTNVPYIYAIGDILEGKLELTPVAIQAGRLLAQRLYGGSNVKCDYDNVPTTVFTPLEYGCCGLSEEKAVEKFGEENIEVYHSFFWPLEWTVPSRDNNKCYAKIICNLKDDERVVGFHVLGPNAGEVTQGFAAALKCGLTKQQLDSTIGIHPVCAEIFTTLSVTKRSGGDILQSGCCG

SEQ ID NO: 307 - protein, 497 aa, Rattus norvegicus
  VARIANT 497: Xaa = Any Amino Acid
MNDSKDAPKSYDFDLIIIGGGSGGLAAAKEAAKFDKKVMVLDFVTPTPLGTNGGLGGTCVNVGCIPKKLMHQAALLGQALKDSRNYGWKLEDTVKHDWEKMTESVQNHIGSLNWGYRVALREKKVVYENAYGKFIGPHKIMATNNKGKEKVYSAERFLIATGERPRYLGIPGDKEYCISSDDLFSLPYCPGKTLVVGASYVALECAGFLAGIGLDVTVMVRSILLRGFDQDMANKIGEHMEEHGIKFIRQFVPTKIEQIEAGTPGRLKVTAKSTNSEETIEDEFNTVLLAVGRDSCTRTIGLETVGVKINEKTGKIPVTDEEQTNVPYIYAIGDILEGKLELTPVAIQAGRLLAQRLYGGSTVKCDYDNVPTTVFTPLEYGCCGLSEEKAVEKFGEENIEVYHSFFWPLEWTVPSRDNNKCYAKVICNLKDNERVVGFHVLGPNAGEVTQGFAAALKCGLTKQQLDSTIGIHPVCAEIFTTLSVTKRSGGDILQSGX

SEQ ID NO: 308 - protein, 176 aa, Rattus norvegicus
RIHAGGAGRRRGGARRAGVFILLAHPNKKGLLRKLSTMNDSKDAPKSYDFDLIIIGGGSGGLAAAKEAAKFDKKVMVLDFVTPTPLGTRWGLGGTCVNVGCIPKKLMHQAALLGQALKDSRNYGWKLEDTVKHDWEKMTESVQNHIGSLNWGYRVALREKKVVYENAYGKFIGPHK

SEQ ID NO: 309 - protein, 498 aa, Rattus norvegicus
  VARIANT 497: Xaa = Any Amino Acid
MNDSKDAPKSYDFDLIIIGGGSGGLAAAKEAAKFDKKVMVLDFVTPTPLGTNGGLGGTCVNVGCIPKKLMHQAALLGQALKDSRNYGWKLEDTVKHDWEKMTESVQNHIGSLNWGYRVALREKKVVYENAYGKFIGPHKIMATNNKGKEKVYSAERFLIATGERPRYLGIPGDKEYCISSDDLFSLPYCPGKTLVVGASYVALECAGFLAGIGLDVTVMVRSILLRGFDQDMANKIGEHMEEHGIKFIRQFVPTKIEQIEAGTPGRLKVTAKSTNSEETIEDEFNTVLLAVGRDSCTRTIGLETVGVKINEKTGKIPVTDEEQTNVPYIYAIGDILEGKLELTPVAIQAGRLLAQRLYGGSTVKCDYDNVPTTVFTPLEYGCCGLSEEKAVEKFGEENIEVYHSFFWPLEWTVPSRDNNKCYAKVICNLKDNERVVGFHVLGPNAGEVTQALQPLKCGLTKQQLDSTIGIHPVCAEIFTTLSVTKRSGGDILQSGCXG

SEQ ID NO: 310 - protein, 11 aa, Rattus norvegicus
MNDSKDAPKSY

SEQ ID NO: 311 - protein, 496 aa, Rattus norvegicus
MNDSKDAPKSYDFDLIIIGGGSGGLAAAKEAAKFDKKVMVLDFVTPTPLGTNGGLGGTCVNVGCIPKKLMHQAALLGQALKDSRNYGWKLEDTVKHDWEKMTESVQNHIGSLNWGYRVALREKKVVYENAYGKFIGPHKIMATNNKGKEKVYSAERFLIATGERPRYLGIPGDKEYCISSDDLFSLPYCPGKTLVVGASYVALECAGFLAGIGLDVTVMVRSILLRGFDQDMANKIGEHMEEHGIKFIRQFVPTKIEQIEAGTPGRLKVTAKSTNSEETIEDEFNTVLLAVGRDSCTRTIGLETVGVKINEKTGKIPVTDEEQTNVPYIYAIGDILEGKLELTPVAIQAGRLLAQRLYGGSTVKCDYDNVPTTVFTPLEYGCCGLSEEKAVEKFGEENIEVYHSFFWPLEWTVPSRDNNKCYAKVICNLKDNERVVGFHVLGPNAGEVTQALQPLKCGLTKQQLDSTIGIHPVCAEIFTTLSVTKRSGGDILQSGC

SEQ ID NO: 312 - protein, 526 aa, Rattus norvegicus
  VARIANT 525: Xaa = Any Amino Acid
MAAIVAALRGSSGRFRPQTRVLTRGTRGAAGAASAAGGQQNFDLLVIGGGSGGLACAKEAAQLGRKVAVADYVEPSPRGTKWGLGGTCVNVGCIPKKLMHQAALLGGMIRDAQHYGWEVAQPVQHNWKAMAEAVQNHVKSLNWGHRVQLQDRKVKYFNIKASFVNEHTVHGVDKAGKVTQLSAKHIVIATGGRPKYPTQVKGALEHGITSDDIFWLKESPGKTLVVGASYVALECAGFLTGIGLDTTVMMRSVPLRGFDQQMASLVTEHMESHGTRFLKGCVPSLIRKLPTNQLQVTWEDLASGKEDVGTFDTVLWAIGRVPETRNLNLEKAGVNTNPKNQKIIVDAQEATSVPHIYAIGDVAEGRPELTPTAIKAGKLLAQRLFGKSSTLMNYSNVPTTVFTPLEYGCVGLSEEEAVALHGQEHIEVYHAYYKPLEFTVADRDASQCYIKMVCMREPPQLVLGLHFLGPNAGEVTQGFALGIQCGASYAQVMQTVGIHPTCSEEVVKLHISKRSGLDPTVTGCXG

SEQ ID NO: 313 - protein, 499 aa, Sus Scrofa
  VARIANT 498: Xaa = Any Amino Acid
MNGAEELPEMYDYDLIIIGGGSGGLAAAKEAARFNKRVMVLDFVTPTPLGTRWGLGGTCVNVSCIPKKLMHQAALLGQALRDSRNYGWNVEETIKHDWERMTEAVQNHIGSLNWGYRVALREKKVTYENAYGQFVGPHRIKATNNKGKEKIYSAEKFLIATGERPRYLGIPGDKEYCISSDDLFSLPYCPGKTLVVGASYVALECAGFLAGIGLDVTVMVRSILLRGFDQDMANKIGEHMEEHGIKFIRQFVPIKVEQIEAGTPGRLRVVAQSTNSEEIIEGEYNTVMLAIGRDACTRKIGLETVGVKINEKTGKIPVTDEEQTNVPYIYAIGDILEDKVELTPVAIQAGRLLAQRLYAGSTVKCDYENVPTTVFTPLEYGACGLSEEKAVEKFGEENIEVYHSYFWPLEWTIPSRDNNKCYAKIICNTKDNERVVGFHVLGPNAGEVTQGFAAALKCGLTKKQLDSTIGIHPVCAEVFTTLSVTKRSGASILQAGCXG

What is claimed is:

1. A method of producing an oil body associated with a recombinant multimeric-protein-complex, said method comprising:
(a) producing in a cell comprising oil bodies, a first recombinant polypeptide and a second recombinant polypeptide wherein said first recombinant polypeptide is capable of associating with said second recombinant polypeptide to form said multimeric-protein-complex; and
(b) associating said multimeric-protein-complex with an oil body through an oil-body-targeting-protein capable of associating with said oil body and said first recombinant polypeptide,
wherein said first recombinant polypeptide is a thioredoxin and said second recombinant polypeptide is a thioredoxin-reductase.

2. A method of expressing a recombinant multimeric-protein-complex comprising a first and second recombinant polypeptide in a cell, said method comprising:
(a) introducing into a cell a first chimeric nucleic acid sequence comprising:
(i) a first nucleic acid sequence capable of regulating transcription in said cell operatively linked to;
(ii) a second nucleic acid sequence encoding a first recombinant polypeptide;
(b) introducing into said cell a second chimeric nucleic acid sequence comprising:
(i) a third nucleic acid sequence capable of regulating transcription in said cell operatively linked to;
(ii) a fourth nucleic acid sequence encoding a second recombinant polypeptide;
(c) growing said cell under conditions to permit expression of said first and second recombinant polypeptide in a progeny cell comprising oil bodies wherein said first recombinant polypeptide and said second recombinant polypeptide are capable of forming a multimeric-protein-complex; and
(d) associating said first recombinant polypeptide with an oil body through an oil-body-targeting-protein capable of associating with said oil body and said first recombinant polypeptide,
wherein said first recombinant polypeptide is a thioredoxin and said second recombinant polypeptide is a thioredoxin-reductase.

3. A method of producing in a plant a recombinant multimeric-protein-complex, said method comprising:
(a) preparing a first plant comprising cells, said cells comprising oil bodies and a first recombinant polypeptide wherein said first recombinant polypeptide is capable of associating with said oil bodies through an oil-body-targeting-protein;
(b) preparing a second plant comprising cells, said cells comprising oil bodies and a second recombinant polypeptide; and
(c) sexually crossing said first plant with said second plant to produce a progeny plant comprising cells, said cells comprising oil bodies, wherein said oil bodies are capable of associating with said first recombinant polypeptide, and said first recombinant recombinant polypeptide is capable of associating with said second recombinant polypeptide to form said recombinant multimeric-protein-complex,
wherein said first recombinant polypeptide is a thioredoxin and said second recombinant polypeptide is a thioredoxin-reductase.

4. A chimeric nucleic acid sequence encoding a multimeric-fusion-protein, said nucleic acid comprising:
(a) a first nucleic acid sequence encoding an oil-body-targeting-protein operatively linked in reading frame to;
(b) a second nucleic acid sequence encoding a first recombinant polypeptide; linked in reading frame to;
(c) a third nucleic acid sequence encoding a second recombinant polypeptide, wherein said first and second recombinant polypeptide are capable of forming a multimeric-protein-complex, and
wherein said first recombinant polypeptide is a thioredoxin and said second recombinant polypeptide is a thioredoxin-reductase.

5. A recombinant multimeric-fusion-protein comprising (i) an oil-body-targeting-protein, or fragment thereof, (ii) a first recombinant polypeptide and a (iii) second recombinant polypeptide, wherein said first and second recombinant polypeptides are capable of forming a multimeric-protein-complex, and
wherein said first recombinant polypeptide is a thioredoxin and said second recombinant polypeptide is a thioredoxin-reductase.

6. Isolated oil bodies comprising a multimeric-protein-complex comprising (i) an oil-body-targeting-protein and (ii) a first recombinant polypeptide, said oil bodies further comprising a second recombinant polypeptide, wherein said first and second recombinant polypeptide are capable of forming a multimeric-protein-complex, and
wherein said first recombinant polypeptide is a thioredoxin and said second recombinant polypeptide is a thioredoxin-reductase.

7. Isolated oil bodies comprising
(a) a first fusion protein comprising a first oil-body-targeting-protein fused to a first recombinant polypeptide; and
(b) a second fusion protein comprising a second oil-body-targeting-protein fused to a second recombinant polypeptide,
wherein said first and second recombinant polypeptide are capable of forming a multimeric-protein-complex, and
wherein said first recombinant polypeptide is a thioredoxin and said second recombinant polypeptide is a thioredoxin-reductase.

8. A cell comprising oil bodies and (i) an oil-body-targeting-protein, (ii) a first recombinant polypeptide and (iii) a second recombinant polypeptide wherein
(1) said first recombinant polypeptide is capable of associating with said oil-body-targeting-protein; and
(2) said first recombinant polypeptide capable of associating with said second recombinant polypeptide to form a multimeric-protein-complex,
wherein said first recombinant polypeptide is a thioredoxin and said second recombinant polypeptide is a thioredoxin-reductase.

9. A composition comprising isolated oil bodies, thioredoxin and thioredoxin-reductase.

10. A food product, personal care product or pharmaceutical composition comprising the composition of claim 9.

11. The personal care product of claim 10 wherein said personal care product reduces the oxidative stress to the surface area of the human body or is used to lighten the skin.

12. A method of reducing allergenicity of a food comprising the steps of:
providing the isolated oil bodies of claim 7; and
adding the isolated oil bodies to the food, whereby allergenicity of the food is reduced.

13. A method of treating or protecting a target against oxidative stress, comprising the steps of:
providing the recombinant fusion polypeptide of claim 3; and
contacting the recombinant fusion polypeptide with a target, wherein the target is susceptible to oxidative stress, thereby treating or protecting against the stress.

14. A method for preparing an enzymatically active redox protein associated with oil bodies comprising:
a) producing in a cell a redox fusion polypeptide comprising a first redox protein linked to a second redox protein;
b) associating said redox fusion polypeptide with oil bodies through an oil-body-targeting-protein capable of associating with said redox fusion polypeptide and said oil bodies; and
c) isolating said oil bodies associated with said redox fusion polypeptide,
wherein said first redox protein is a thioredoxin and said second redox protein is a thioredoxin-reductase.

15. A method for preparing a redox protein associated with oil bodies comprising:
a) introducing into a cell a chimeric nucleic acid sequence comprising:
1) a first nucleic acid sequence capable of regulating transcription in said cell operatively linked to;
2) a second nucleic acid sequence encoding a recombinant fusion polypeptide comprising (i) a nucleic acid sequence encoding a sufficient portion of an oil-body-protein to provide targeting of said recombinant fusion polypeptide to an oil body linked to (ii) a nucleic acid sequence encoding a redox fusion polypeptide comprising a first redox protein linked to a second redox protein operatively linked to;
3) a third nucleic acid sequence capable of terminating transcription in said cell;
b) growing said cell under conditions to permit expression of said redox fusion polypeptide in a progeny cell comprising oil bodies; and
c) isolating from said progeny cell said oil bodies comprising said redox fusion polypeptide,
wherein said first redox protein is a thioredoxin and said second redox protein is a thioredoxin-reductase.

16. A chimeric nucleic acid comprising:
1) a first nucleic acid sequence capable of regulating transcription in a host cell operatively linked to;
2) a second nucleic acid sequence encoding a recombinant fusion polypeptide comprising (i) a nucleic acid sequence encoding a sufficient portion of an oil-body-protein to provide targeting of said recombinant fusion polypeptide to an oil body linked to (ii) a nucleic acid sequence encoding a redox fusion polypeptide comprising a first redox protein linked to a second redox protein operatively linked to;
3) a third nucleic acid sequence capable of terminating transcription in said cell,
wherein said first redox protein is a thioredoxin and said second redox protein is a thioredoxin-reductase.

17. A transgenenic plant comprising the chimeric nucleic acid sequence of claim 16.

18. A plant seed comprising the chimeric nucleic acid of claim 16.

19. A safflower seed comprising the chimeric nucleic acid of claim 16.

20. A nucleic acid construct comprising a gene fusion, wherein the gene fusion comprises a first region encoding an oil-body-protein or an active fragment thereof, operably linked to a second region encoding at least one thioredoxin-related protein or an active fragment thereof,
wherein the at least one thioredoxin-related protein is selected from thioredoxin or thioredoxin-reductase.

21. A transgenic plant containing a nucleic acid construct comprising a gene fusion, wherein the gene fusion comprises a region encoding an oil-body-protein or an active fragment thereof, operably linked to a region encoding a first thioredoxin-related protein or an active fragment thereof,
wherein the thioredoxin-related protein is selected from thioredoxin or thioredoxin-reductase.

22. A transgenic plant comprising a nucleic acid construct comprising a seed-specific promoter operably linked to a gene fusion, wherein the gene fusion comprises a region encoding an oil-body-protein or an active fragment thereof, operably linked to a region encoding a first thioredoxin-related protein or an active fragment thereof, wherein a fusion protein comprising activities of oleosin and the thioredoxin-related protein is produced in a seed of the plant,
wherein the thioredoxin-related protein is selected from thioredoxin or thioredoxin-reductase.

23. A method of making a fusion protein comprising a thioredoxin-related activity, the method comprising the steps of:
providing a transgenic plant comprising a nucleic acid construct comprising a seed-specific promoter operably linked to a gene fusion, wherein the gene fusion comprises a region encoding an oil-body-protein or an active fragment thereof, operably linked to a region encoding a first thioredoxin-related protein or an active fragment thereof, the gene fusion encoding a fusion protein comprising a thioredoxin-related activity;
obtaining seeds from the plant; and
recovering the fusion protein by isolating oil bodies from the seeds,
wherein the thioredoxin-related protein is selected from thioredoxin or thioredoxin-reductase.

24. A method of reducing allergenicity of a food comprising the steps of:
providing a preparation comprising oil bodies associated with a fusion protein, the fusion protein comprising an oil-body-protein or an active fragment thereof and a thioredoxin-related protein or an active fragment thereof; and
adding the preparation to the food, whereby allergenicity of the food is reduced due to activity of the thioredoxin-related protein or fragment,
wherein the thioredoxin-related protein is selected from thioredoxin or thioredoxin-reductase.

25. A composition comprising a fusion protein, the fusion protein comprising an oil-body-protein or an active fragment thereof and a thioredoxin-related protein or an active fragment thereof, in a pharmaceutically acceptable carrier,
wherein the thioredoxin-related protein is selected from thioredoxin or thioredoxin-reductase.

26. A cosmetic formulation comprising oil bodies associated with a fusion protein, the fusion protein comprising an oil-body-protein or an active fragment thereof and a thioredoxin-related protein or an active fragment thereof, in an acceptable carrier,
wherein the thioredoxin-related protein is selected from thioredoxin or thioredoxin-reductase.

27. A method of treating or protecting a target against oxidative stress, comprising the steps of:
providing a preparation comprising a fusion protein, the fusion protein comprising an oil-body-protein or an active fragment thereof and a thioredoxin-related protein or an active fragment thereof; and
contacting the preparation with a target, wherein the target is susceptible to oxidative stress, thereby treating or protecting against the stress,
wherein the thioredoxin-related protein is selected from thioredoxin or thioredoxin-reductase.

28. A nucleic acid construct comprising a gene fusion, wherein the gene fusion comprises a first region encoding an oil-body-protein or an active fragment thereof, operably linked to a second region encoding at least one recombinant polypeptide and an oil-body-surface-avoiding linker in frame between the first and second region polypeptides.
